(19) United States
(12) Patent Application Publication
(10) Pub. No.: US 2023/0331801 A1
(43) Pub. Date: Oct. 19, 2023

(54) IL-2R-BETA-GAMMA BINDING COMPOUNDS

(71) Applicant: MEDIKINE, INC., MENLO PARK, CA (US)

(72) Inventors: WILLIAM J. DOWER, MENLO PARK, CA (US); MICHAEL C. NEEDELS, MENLO PARK, CA (US); RONALD W. BARRETT, MENLO PARK, CA (US); ALICE V. BAKKER, MENLO PARK, CA (US); STEVEN E. CWIRLA, MENLO PARK, CA (US)

(73) Assignee: MEDIKINE, INC., MENLO PARK, CA (US)

(21) Appl. No.: 18/321,472

(22) Filed: May 22, 2023

Related U.S. Application Data
(63) Continuation of application No. 17/089,515, filed on Nov. 4, 2020, now Pat. No. 11,718,654.
(60) Provisional application No. 62/930,758, filed on Nov. 5, 2019.

(51) Int. Cl. C07K 14/55; C07K 16/30; A61K 38/00; A61K 39/00

(52) U.S. Cl. CPC C07K 14/55; C07K 16/30; C07K 2319/01; C07K 2319/30; C07K 2319/75; C07K 2317/92; A61K 38/00; A61K 2039/505

(57) ABSTRACT

IL-2Rβγc binding compounds, and pharmaceutical compositions comprising the IL-2Rβγc binding compounds are disclosed. IL-2Rβγc binding compounds can act as IL-2R agonists and are useful in treating cancer, autoimmune diseases and inflammatory diseases.

[0001] This application is a continuation of U.S. application Ser. No. 17/089,515, filed on Nov. 4, 2020, now allowed, which claims the benefit under 35 U.S.C. § 119(e) of U.S. Provisional Application No. 62/930,758 filed on Nov. 5, 2019, each of which is incorporated by reference in its entirety.

### FIELD

[0002] The present disclosure relates to IL-2Rβγc binding compounds. The IL-2Rβγc binding compounds can act as IL-2R agonists or partial IL-2R agonists.

### SEQUENCE LISTING

[0003] The Sequence Listing associated with this application is filed in electronic format via EFS-Web and is incorporated by reference in its entirety.

### BACKGROUND

[0004] Recombinant human Interleukin-2 (IL-2) was one of the first immuno-oncology agents studied in the clinic and was approved by the FDA in the 1990s for use against some particularly challenging cancers such as melanoma and renal carcinoma. IL-2 is effective, producing durable responses in up to 10% of patients with these tumors, but its utility is limited by very serious, dose-limiting toxicities. In addition, the efficacy of IL-2 in directing T-cell-mediated anti-tumor response is compromised by concurrent IL-2-driven upregulation of T-cell suppressive systems. There has been a continuing search for strategies to reduce the toxicity of IL-2 therapy, and to avoid the immunosuppressive limitations on anti-tumor activity. To date, modestly effective strategies have been developed to control systemic exposure, and thus toxicity, of this potent biologic. Elucidation of the complicated biology of IL-2 has led to modifications of the natural IL-2 molecule to alter the balance of tumor toxicity and suppression.

[0005] However, these approaches are limited by the use of natural IL-2 as a template, thus retaining elements of the undesirable, structure-driven bioactivities of the parent molecule.

[0006] Crucial to its anti-tumor properties, IL-2 exerts potent stimulatory effects on NK and cytotoxic CD8+ T-cells. However, the anti-tumor effects are paradoxically suppressed by IL-2-directed stimulation of T-regulatory cells (Tregs), which effectively blunts the anti-tumor immune response. This dual effect of IL-2 is largely controlled by the nature of the IL-2 receptor (IL-2R) subunits expressed on the various cells responsible for immune homeostasis. IL-2 is recognized by combinations of three receptor subunits, which are differentially and conditionally expressed on many types of immune cells. The two signaling subunits, known as IL-2Rβ (β) and IL-2Rγ-common (γc), initiate signaling when brought into correctly oriented apposition by binding to IL-2. IL-2 binds to IL-2Rβγc with an IC₅₀ of about 1 nM to form an active ternary complex. Most immune cells express, at various levels, the IL-2Rβ and IL-2Rγc subunits. There is also a third, non-signaling IL-2R subunit, IL-2Rα (CD25), which is expressed on a subset of immune cells, notably Tregs. The complex of IL-2Rαβγc has a very high affinity for IL-2 (about 10 pM), and cells expressing all three subunits are therefore much more sensitive to IL-2. A popular and well-supported strategy for improving the efficacy of IL-2R agonists against tumors involves engineering IL-2R selectivity to reduce the binding of IL-2 to the IL-2Rα subunit while maintaining IL-2Rβγc binding and signaling to favor infiltration and stimulation of cytotoxic effector T-cells (Teff cells) over Tregs at tumor sites.

[0007] The cause of IL-2 toxicity in the clinical setting is less well understood; but is thought to be the result of exaggerated peripheral immuno-stimulation of IL-2Rβγc-expressing T-cells accompanied by excessive release of inflammatory cytokines. Toxicity is induced by the frequent administration of high doses of IL-2 required to sustain adequate tumor exposure because of the short half-life of the natural cytokine.

[0008] Strategies to address the limitations of IL-2 as a useful immuno-oncology therapy utilize mutants, fusion proteins, or chemically modified IL-2 to alter the complex biology of the immune regulator. However, it is difficult to optimize selective IL-2Rβγc binding and signaling of modified IL-2 during pre-clinical and clinical development. This limits the use of a bioactive IL-2 protein as a starting point for imparting multiple new properties.

### SUMMARY

[0009] According to the present invention, an IL-2Rβ ligand, wherein the IL-2Rβ ligand comprises an amino acid sequence of any one of Formula (1)-(1d), Formula (2)-(2d), Formula (3)-(3e), and Formula (4)-(4f), an amino acid sequence of any one of SEQ ID NOS: 805-903, 911-930, 2575-2655, 2661-2891, 2900-2926, and 2929-2939, a truncated amino acid sequence of any of the foregoing, a substituted amino acid sequence of any of the foregoing, any of the foregoing amino acid sequences having flanking amino acids, and an amino acid sequence having greater than 60% sequence similarity to any of the foregoing.

[0010] According to the present invention, an IL-2Rγc ligand, wherein the IL-2Rγc ligand comprises an amino acid sequence of any one of Formula (5)-(5e); an amino acid sequence of any one of SEQ ID NOS: 944-1028, 1032-1060, and 1601-1613, a truncated amino acid sequence of any of the foregoing, a substituted amino acid sequence of any of the foregoing, any of the foregoing amino acid sequences having flanking amino acids, and an amino acid sequence having greater than 60% sequence similarity to any of the foregoing.

[0011] According to the present invention, an IL-2Rβγc ligand comprises an IL-2Rβ ligand according to the present invention and an IL-2Rγc ligand according to the present invention.

[0012] According to the present invention, an IL-2Rβγc binding compound comprises an IL-2Rβ ligand according to the present invention and an IL-2Rγc ligand according to the present invention.

[0013] According to the present invention, an IL-2Rβγc binding compound comprises an IL-2Rβγc ligand according to the present invention.

[0014] According to the present invention, pharmaceutical compositions comprise an IL-2Rβγc binding compound according to the present invention.

[0015] According to the present invention, methods of treating a disease in a patient comprising administering to a patient in need of such treatment a therapeutically effective amount of an IL-2Rβγc binding compound according to the present invention, or a pharmaceutical composition according to the present invention.

[0016] According to the present invention, methods of expanding immune cells comprising contacting a population of immune cells ex vivo or in vivo with an effective amount of an IL-2Rβ ligand according to the present invention, an IL-2Rγc ligand according to the present invention, or an IL-2Rβγc binding compound according to the present invention.

[0017] According to the present invention, methods of cell therapy comprise engineering a cell to express an IL-2Rβγc binding compound according to the present invention.

[0018] According to the present invention, methods of boosting a vaccine comprise administering to a patient a vaccine and a therapeutically effective amount of an IL-2Rβγc binding compound according to the present invention, or a pharmaceutical composition according to the present invention.

[0019] According to the present invention, methods of modifying the immune response comprise administering to a patient an effective amount of an IL-2Rβγc binding compound according to the present invention, or the pharmaceutical composition according to the present invention.

[0020] According to the present invention, a nucleic acid encodes for an IL-2Rβ ligand according to the present invention, an IL-2Rγc ligand according to the present invention, an IL-2Rβγc ligand an IL-2Rβγc binding compound according to the present invention, or an IL-2Rβγc binding compound an IL-2Rβγc binding compound according to the present invention.

### BRIEF DESCRIPTION OF THE DRAWINGS

[0021] The drawings described herein are for illustration purposes only. The drawings are not intended to limit the scope of the present disclosure.

[0022] FIG. 1 shows examples of IL-2Rβγc ligands having different C/N orientations of an IL-2Rβ ligand and an IL-2Rγc ligand.

[0023] FIG. 2 shows STAT5 phosphorylation in TF-1β cells exposed to various IL-2Rβγc ligands having different IL-2Rβ and IL-2Rγc ligands with different C/N orientations and different ligand linker lengths.

[0024] FIG. 3 shows STAT5 phosphorylation in NK-92 cells exposed to various IL-2Rβγc ligands having different IL-2Rβ and IL-2Rγc ligands with a C/C orientation and with the same IL-2Rβγc ligand linker.

[0025] FIG. 4 shows STAT5 phosphorylation in NK-92 cells exposed to IL-2Rβγc ligands having an IL-2RP ligand having SEQ ID NO: 865 (BL4) and an IL-2Rγc ligand of SEQ ID NO: 965 (GL2), with different C/N orientations.

[0026] FIGS. 5A and 5B show STAT5 phosphorylation in TF-1β cells exposed to IL-2Rβγc ligands having different IL-2Rβ and IL-2Rγc ligands with a C/N orientation and with the same IL-2Rβγc ligand linker. In FIG. 5A the IL-2Rβ ligand is (BL4) (SEQ ID NO: 865) and is coupled to different IL-2Rγc ligands. In FIG. 5B the IL-2Rγc ligand is (GL2) (SEQ ID NO: 965) and is coupled to different IL-2Rβ ligands.

[0027] FIG. 6 shows STAT5 phosphorylation in NK-92 cells exposed to IL-2Rβγc ligands having an IL-2RP ligand having SEQ ID NO: 865 (BL4) and an IL-2Rγc ligand of SEQ ID NO: 965 (GL2), having either a -GGGGS- (G4S) (SEQ ID NO: 9395) amino acid linker (IL-2Rβγc ligand (BGL21)) or a click chemistry-derived triazole-containing linker (IL-2Rβγc ligand (BGL20)).

[0028] FIGS. 7A-7C show STAT5 phosphorylation in NK-92 cells, AKT phosphorylation in NK-92 cells, and ERK1/2 phosphorylation in NK-92 cells, respectively, following exposure to either IL-2Rβγc ligand (BGL21) or to IL-2.

[0029] FIGS. 8A and 8B show NK-92 cell proliferation following exposure to either IL-2 or to IL-2Rβγc ligand (BGL21) in terms of viable cell number or % Ki-67+ cells, respectively.

[0030] FIGS. 9A-9C show STAT5 phosphorylation in resting CD8+ T-cells, Treg cells, or CD4+ T-cells, respectively, following exposure to either IL-2 or to IL-2Rβγc ligand (BGL21).

[0031] FIGS. 10A and 10B show proliferation of NK-92 cells following exposure to either IL-2 or to IL-2Rβγc ligand (BGL21) in terms of % Ki-67+ cells and median fluorescence intensity, respectively.

[0032] FIG. 11A shows the upregulation of PD-L1 expression in A549 tumor cells following co-culture with PBMCs and either IL-2 or IL-2Rβγc ligand (BGL21).

[0033] FIGS. 11B and 11C show the % cytotoxicity in LS180 cells and the % cytotoxicity in COLO205 cells, respectively, following co-culture with PBMCs and either IL-2 or IL-2Rβγc ligand (BGL21).

[0034] FIG. 12 shows the STAT5 phosphorylation in TF-1β cells following exposure to IL-2 or to various IL-2Rβγc ligand (BGL21)-fusion proteins.

[0035] FIG. 13 shows the STAT5 phosphorylation in TF-1β cells following exposure to IL-2 or to various IL-2Rβγc ligand-Fc fusion proteins having different IL-2Rβγc ligands.

[0036] FIG. 14 shows the STAT5 phosphorylation in TF-1β cells following exposure to various IL-2Rβγc ligand (BGL21)-Fc fusion proteins derived from different IgG isotypes.

[0037] FIG. 15 shows the STAT5 phosphorylation in TF-1β cells following exposure to IL-2Rβγc ligand (BGL21)-Fc fusion proteins having different Fc linkers.

[0038] FIGS. 16A and 16B show the STAT5 phosphorylation in TF-1β cells (FIG. 16A) or % Ki-67 activity (FIG. 16B) in NK-92 cells following exposure to IL-2Rβγc ligand (BGL21) or to IL-2Rβγc ligand (BGL21)-Fc fusion proteins having different Fc linkers.

[0039] FIGS. 17A-17D show PD-1 binding affinity (FIGS. 17A and 17C) and IL-2R agonist activity as determined by STAT5 phosphorylation (FIGS. 17B and 17D) in TF-1β cells following exposure to an anti-PD-1 antibody (pembrolizumab or cemiplimab), to an IL-2Rβγc ligand (BGL21)-Fc fusion protein (FP1) (SEQ ID NO: 1212), or to an IL-2Rβγc ligand (BGL21)-anti-PD-1 antibody (FP8) (SEQ ID NO: 1219) and (FP10) (SEQ ID NO: 1221).

[0040] FIG. 18 shows the STAT5 phosphorylation in NK-92 cells following exposure to IL-2, to IL-2Rβγc ligand (BGL21), or to PEGylated IL-2Rβγc ligand (BGL21).

[0041] FIGS. 19A-19C show the amino acid sequences and linker structures for certain IL-2Rβγc ligands provided by the present disclosure. As shown in FIGS. 19A-19C, the IL-2Rβ ligand is coupled to the IL-2Rγc ligand through the linker structure (L). For example, in IL-2Rβγc ligand (BGL1) the C terminus of an IL-2Rβ ligand having SEQ ID NO: 58 is coupled to the C terminus of an IL-2Rγc ligand having SEQ ID NO: 224 through a linker having the structure (L2). As described, IL-2Rβγc ligand (BGL1) is synthesized by reacting an IL-2Rβ ligand having SEQ ID NO: 58 with an H₂N— group on the N terminus and an alkyne moiety (AL1) on the C terminus, with an IL-2Rγc ligand having SEQ ID NO: 224 with an H₂N— group on the N terminus and an azide moiety (AZ1) on the C terminus.

[0042] FIGS. 20A-20J show the amino acid sequences for certain IL-2Rβγc ligand fusion proteins provided by the present disclosure.

[0043] FIGS. 21A-21C provides a summary of the sub-structures for the IL-2Rβγc ligand constructs provided in FIGS. 20A-20J. FIGS. 21A-C discloses “(G4S)₂” as SEQ ID NO: 9396, “(G4S)₃” as SEQ ID NO: 9397, “(GS)₁₀” as SEQ ID NO: 9407, “(PA)₁₀” as SEQ ID NO: 9428, “(G4S)₁” as SEQ ID NO: 9395, “(GGS)₁” as SEQ ID NO: 9402, “(G4S)₄” as SEQ ID NO: 9398, “(G)₂” as SEQ ID NO: 9399, “(G)₅” as SEQ ID NO: 9401, “(PA)₅” as SEQ ID NO: 9426 and “(PA)₇” as SEQ ID NO: 9427.

[0044] FIGS. 22A-22F show examples of various configurations of IL-2Rβγc ligand fc-fragment fusion proteins provided by the present disclosure.

[0045] FIGS. 23A-23F show examples of various configurations of IL-2Rβγc ligand immunoglobulin fusion proteins provided by the present disclosure.

[0046] FIG. 24 shows the STAT5 phosphorylation in NK-92 cells following exposure to a pH-biased IL-2Rβγc ligand at pH 6.0 and at pH 7.5.

[0047] FIG. 25 shows the normalized ELISA signal for competitive binding of a pH-biased IL-2Rβγc ligand at pH 6.0 and pH 7.4 to the IL-2Rβ subunit.

[0048] FIG. 26 shows a PK profile of a PEG-IL-2Rβγc ligand construct (PEG-1) following administration to mice.

[0049] FIGS. 27-33 show examples of PEG-IL-2Rβγc ligand constructs PEG-1 to PEG-7, respectively. The IL-2Rβγc ligand has SEQ ID NO: 1263.

### DETAILED DESCRIPTION

[0050] A dash (“-”) that is not between two letters or symbols is used to indicate a point of attachment for a moiety or substituent. For example, —CONH₂ is attached through the carbon atom and -X¹-X²-denotes amino acids X¹ and X² covalently bound through a single bond.

[0051] “Alkyl” refers to a saturated, branched, or straight-chain, monovalent hydrocarbon radical derived by the removal of one hydrogen atom from a single carbon atom of a parent alkane, alkene, or alkyne. Examples of alkyl groups include methyl; ethyls such as ethanyl, ethenyl, and ethynyl; propyls such as propan-1-yl, propan-2-yl, prop-1-en-1-yl, prop-1-en-2-yl, prop-2-en-1-yl (allyl), prop-1-yn-1-yl, prop-2-yn-1-yl, etc.; butyls such as butan-1-yl, butan-2-yl, 2-methyl-propan-1-yl, 2-methyl-propan-2-yl, but-1-en-1-yl, but-1-en-2-yl, 2-methyl-prop-1-en-1-yl, but-2-en-1-yl, but-2-en-2-yl, buta-1,3-dien-1-yl, buta-1,3-dien-2-yl, but-1-yn-1-yl, but-1-yn-3-yl, but-3-yn-1-yl, etc.; and the like. The term “alkyl” is specifically intended to include groups having any degree or level of saturation, i.e., groups having exclusively carbon-carbon single bonds, groups having one or more carbon-carbon double bonds, groups having one or more carbon-carbon triple bonds, and groups having combinations of carbon-carbon single, double, and triple bonds. Where a specific level of saturation is intended, the terms alkanyl, alkenyl, and alkynyl are used. In certain embodiments, an alkyl group is C₁₋₆ alkyl, C₁₅ alkyl, C₁ alkyl, C₁₋₃ alkyl, and in certain embodiments, ethyl or methyl.

[0052] “Cycloalkyl” refers to a saturated or partially unsaturated cyclic alkyl radical. In certain embodiments, a cycloalkyl group is C₃₋₆ cycloalkyl, C₃₋₅ cycloalkyl, C₅₋₆ cycloalkyl, cyclopropyl, cyclopentyl, and in certain embodiments, cyclohexyl. In certain embodiments, cycloalkyl is selected from cyclopropyl, cyclobutyl, cyclopentyl, and cyclohexyl.

[0053] “Heterocycloalkyl” by itself or as part of another substituent refers to a saturated or unsaturated cyclic alkyl radical in which one or more carbon atoms (and certain associated hydrogen atoms) are independently replaced with the same or different heteroatom; or to a parent aromatic ring system in which one or more carbon atoms (and certain associated hydrogen atoms) are independently replaced with the same or different heteroatom such that the ring system violates the Hückel-rule. Examples of heteroatoms to replace the carbon atom(s) include N, P, O, S, and Si. Examples of heterocycloalkyl groups include groups derived from epoxides, azirines, thiiranes, imidazolidine, morpholine, piperazine, piperidine, pyrazolidine, pyrrolidine, quinuclidine, and the like. In certain embodiments, heterocycloalkyl is C₅ heterocycloalkyl and is selected from pyrrolidinyl, tetrahydrofuranyl, tetrahydrothiophenyl, imidazolidinyl, oxazolidinyl, thiazolidinyl, doxolanyl, and dithiolanyl. In certain embodiments, heterocycloalkyl is C₆ heterocycloalkyl and is selected from piperidinyl, tetrahydropyranyl, piperizinyl, oxazinyl, dithianyl, and dioxanyl. A heterocycloalkyl group can be C₃₋₆ heterocycloalkyl, C₃₋₅ heterocycloalkyl, C₅₋₆ heterocycloalkyl, and in certain embodiments, C₅ heterocycloalkyl or C₆ heterocycloalkyl. A heteroatomic group can be selected from —O—, —S—, —NH—, —N(—CH3)-, —SO—, and —SO2-, in certain embodiments, the heteroatomic group is selected from —O— and —NH—, and in certain embodiments the heteroatomic group is —O— or —NH—.

[0054] “Binding affinity” refers to the strength of the binding interaction between a single biomolecule and its ligand/binding partner. Binding affinity is expressed as the IC₅₀.

[0055] “Agonist” refers to a biologically active ligand which binds to its complementary biologically active receptor or subunit(s) and activates the receptor to cause a biological response mediated by the receptor, or to enhance a preexisting biological activity mediated by the receptor.

[0056] “Partial agonist” refers to a compound that provides a level of activation, that is, for example, less than 75% of maximum activation, less than 50%, less than 25%, less than 10%, or less than 1% of the maximum activation. A partial IL-2R agonist exhibits a level of activation that is less than the level of activation provided by IL-2. For example, a partial IL-2R agonist exhibits a level of activation that is less than the level of activation provided by IL-2 and a partial IL-2R agonist exhibits a level of activation that is less than the level of activation provided by IL-2.

[0057] “Antagonist” refers to a biologically active ligand or compound that binds to its complementary receptor or subunit(s) and blocks or reduces a biological response of the receptor. For example, an IL-2R antagonist binds to IL-2R with an IC₅₀ of less than 100 pM and inhibits functional activity of IL-2 as determined, for example, using any of the functional assays disclosed in the examples. For example, an IL-2R antagonist binds to IL-2R with an IC₅₀ of less than 100 pM and inhibits functional activity of IL-2 as determined, for example, using any of the functional assays disclosed in the examples.

[0058] Amino acid residues are abbreviated as follows: alanine is Ala or A; arginine is Arg or R; asparagine is Asn or N; aspartic acid is Asp or D; cysteine is Cys or C; glutamic acid is Glu or E; glutamine is Gln or Q; glycine is Gly or G; histidine is His or H; isoleucine is Ile or I; leucine is Leu or L; lysine is Lys or K; methionine is Met or M; phenylalanine is Phe or F; proline is Pro or P; serine is Ser or S; threonine is Thr or T; tryptophan is Trp or W; tyrosine is Tyr or Y; and valine is Val or V.

[0059] “Non-natural amino acids” include, for example, β-amino acids, homo-amino acids, proline and pyruvic acid derivatives, histidine derivatives with alkyl or heteroatom moieties attached to the imidazole ring, amino acids with pyridine-containing side chains, 3-substituted alanine derivatives, glycine derivatives, ring-substituted phenylalanine and tyrosine derivatives, and N-methyl amino acids.

[0060] Amino acids having a large hydrophobic side chain include isoleucine (I), leucine (L), methionine (M), valine (V), phenylalanine (F), tyrosine (Y), and tryptophan (W).

[0061] Amino acids having a small hydrophobic side chain include alanine (A), glycine (G), proline (P), serine (S), and threonine (T).

[0062] Amino acids having a basic side chain include arginine (R), lysine (K), and histidine (H).

[0063] Amino acids having an acidic side chain include aspartate (D) and glutamate (E).

[0064] Amino acids having a polar/neutral side chain include histidine (H), asparagine (N), glutamine (Q), serine (S), threonine (T), and tyrosine (Y).

[0065] Amino acids having an aromatic side chain include phenylalanine (F), histidine (H), tryptophan (W), and tyrosine (Y).

[0066] Amino acids having a hydroxyl side chain include serine (S), threonine (T), and tyrosine (Y).

[0067] “Conservative amino acid substitution” means that amino acids within each of the following groups can be substituted with another amino acid within the group: amino acids having a small hydrophobic side chain comprising alanine (A), glycine (G), proline (P), serine (S), and threonine (T); amino acids having a hydroxyl-containing side chain comprising serine (S), threonine (T), and tyrosine (Y); amino acids having an acidic side chain comprising aspartate (D) and glutamate (E); amino acids comprising a polar-neutral side chain comprising histidine (H), asparagine (N), glutamine (Q), serine (S), threonine (T), and tyrosine (Y); amino acids having a basic side chain comprising arginine (R), lysine (K), and histidine (H); amino acids having a large hydrophobic side chain comprising isoleucine (I), leucine (L), methionine (M), valine (V), phenylalanine (F), tyrosine (Y), and tryptophan (W)); and amino acids having an aromatic side chain comprising phenylalanine (F), histidine (H), tryptophan (W), and tyrosine (Y).

[0068] “PEG,” “polyethylene glycol” and “poly(ethylene glycol)” refer to any suitable nonpeptidic water-soluble poly(ethylene oxide). PEGs can comprise a structure —(OCH₂CH₂)ₙ— where n is, for example, an integer from 1 to 4,000. A PEG can also include moieties such as —CH₂CH₂—O(CH₂CH₂O)ₙ—CH₂CH₂— and/or —(OCH₂CH₂)ₙO—, depending upon whether or not the terminal oxygens have been displaced, e.g., during a synthetic transformation. A PEG can be capped with a suitable end group. At least 50% of the repeating subunits of a PEG can have the structure —CH₂CH₂—. A PEG can have any suitable molecular weight, structure, and/or geometry such as branched, linear, forked, or multifunctional.

[0069] A “physiologically cleavable” or “hydrolyzable” or “degradable” bond is a bond that reacts with water (i.e., is hydrolyzed) under physiological conditions. The tendency of a bond to hydrolyze in water will depend not only on the general type of linkage connecting two central atoms but also on the substituents attached to these central atoms. Suitable hydrolytically unstable or weak linkages include, for example, carboxylate ester, phosphate ester, anhydrides, acetals, ketals, acyloxyalkyl ether, imines, orthoesters, peptides, and oligonucleotides.

[0070] An “enzymatically degradable linkage” refers to a chemical linkage that can be degraded or cleaved by one or more enzymes.

[0071] A “hydrolytically stable” linkage or bond refers to a chemical bond, such as a covalent bond, that is substantially stable in water such that the chemical bond does not undergo hydrolysis under physiological conditions to any appreciable extent over an extended period of time. Examples of hydrolytically stable linkages include, but are not limited to, the following: carbon-carbon bonds (e.g., in aliphatic chains), ethers, amides, urethanes, and the like. Generally, a hydrolytically stable linkage is one that exhibits a rate of hydrolysis of less than about 1% to 2% per day under physiological conditions.

[0072] An “IL-2Rα ligand” refers to a peptide capable of binding to the IL-2Rα subunit of a mammalian IL-2 receptor, such as a human IL-2 receptor, with an IC₅₀ less than 100 μM.

[0073] An “IL-2Rβ ligand” refers to a peptide capable of binding to the IL-2Rβ subunit of a mammalian IL-2 receptor, such as a human IL-2 receptor, with an IC₅₀ less than 100 μM.

[0074] An “IL-2Rβ ligand” or an “IL-2Rβ ligand provided by the present disclosure” includes, for example, a peptide having an amino acid sequence of any one of SEQ ID NOS: 805-903, 911-930, 2575-2655, 2661-2891, 2900-2986, and 2989-2939, a truncated amino acid sequence based on SEQ ID NOS: 805-903, 911-930, 2575-2655, 2661-2891, 2900-2986, and 2989-2939, an amino acid sequence having SEQ ID NOS: 805-903, 911-930, 2575-2655, 2661-2891, 2900-2986, and 2989-2939 and flanking amino acids, an amino acid sequence based on SEQ ID NOS: 805-903, 911-930, 2575-2655, 2661-2891, 2900-2986, and 2989-2939 having one or more conservative or non-conservative amino acid substitutions, compounds incorporating one or more amino acid sequences having SEQ ID NOS: 805-903, 911-930, 2575-2655, 2661-2891, 2900-2986, and 2989-2939, or a combination of any of the foregoing.

[0075] An “IL-2Rγc ligand” refers to a peptide capable of binding to the IL-2Rγc subunit of a mammalian IL-2 receptor, such as a human IL-2 receptor, with an IC₅₀ less than 100 μM.

[0076] An “IL-2Rγc ligand” or an “IL-2Rγc ligand provided by the present disclosure” includes, for example, a peptide having an amino acid sequence of any one of SEQ ID NOS: 944-1028, 1032-1060, and 1601-1613, a truncated amino acid sequence based on SEQ ID NOS: 944-1028, 1032-1060, and 1601-1613, an amino acid sequence having SEQ ID NOS: 944-1028, 1032-1060, and 1601-1613 and flanking amino acids, an amino acid sequence based on SEQ ID NOS: 944-1028, 1032-1060, and 1601-1613 having one or more conservative or non-conservative amino acid substitutions, compounds incorporating one or more amino acid sequences having SEQ ID NOS: 944-1028, 1032-1060, and 1601-1613, or a combination of any of the foregoing.

[0077] An “IL-2Rβγc ligand” or IL-2Rβγc ligand provided by the present disclosure” includes, for example, an at least one IL-2Rβ ligand provided by the present disclosure and at least one IL-2Rγc ligand provided by the present disclosure.

[0078] A ligand comprising an amino acid sequence having SEQ ID NO: refers to a ligand having the amino acid sequence identified by the SEQ ID NO: a truncated amino acid sequence based on the SEQ ID NO: an amino acid sequence having the SEQ ID NO: and flanking amino acids, an amino acid sequence based on the SEQ ID NO: having one or more conservative or non-conservative amino acid substitutions, compounds incorporating one or more amino acid sequences having SEQ ID NO: or a combination of any of the foregoing.

[0079] The “hIL-2Rβ subunit” refers to the human (Homo sapiens) interleukin-2 receptor subunit f precursor NCBI Reference Sequence NP_000689.1.

[0080] The “hIL-2Rγc subunit” refers to the human (Homo sapiens) interleukin-2 receptor subunit γ precursor NCBI Reference Sequence NP_000197.1.

[0081] The “cyano-IL-2Rβ subunit” refers to the cynomolgus monkey interleukin-2 receptor subunit β precursor NCBI Reference Sequence NP_001244989.1.

[0082] The “cyano-IL-2Rγc subunit” refers to the cynomolgus monkey interleukin-2 receptor subunit a precursor NCBI Reference Sequence XP_005593949.

[0083] A recombinant “ligand fusion protein” refers to a protein made by recombinant DNA technology in which the translational reading frame of a ligand of a mammalian IL-2 receptor is fused to that of another protein, i.e., the IL-2R ligand fusion partner, to produce a single recombinant polypeptide. A ligand fusion protein can comprise an IL-2Rβ ligand and an IL-2Rγc ligand, an IL-2Rβγc ligand, and/or a tandem IL-2Rβγc ligand. A fusion partner can be the Fc domain of an IgG molecule where the IL-2Rβγc ligand is attached to the two C-termini of the Fc structure. A ligand fusion protein can include a peptidyl linker such as an amino acid sequence located between an IL-2R ligand and a fusion protein partner comprising a fusion protein, such that the peptidyl linker amino acid sequence is not derived from either the IL-2R ligand or the fusion protein partner. Peptidyl linkers can be incorporated into fusion proteins as spacers to promote proper protein folding and stability of the component protein moieties, to improve protein expression, and/or to enable better bioactivity of the two fusion partners. Peptidyl linkers can include, for example, a flexible peptide or a rigid peptide.

[0084] An “IL-2Rβγc ligand” refers to a compound consisting of or comprising one or more IL-2Rβ ligands and one or more IL-2Rγc ligands. The one or more IL-2Rβ ligands and one or more IL-2Rγc ligands can be bound to an IL-2Rβγc ligand linker. An IL-2Rβγc ligand can comprise a tandem IL-2Rβγc ligand comprising two or more IL-2Rβγc ligands, or it can comprise a single ligand that simultaneously binds to both the IL-2Rβ subunit and the IL-2Rγc subunit. An IL-2Rβγc ligand is capable of binding to the IL-2Rβ subunit and to the IL-2Rγc subunit of IL-2R with an IC₅₀ less than 100 μM.

[0085] An “IL-2Rβγc ligand construct” refers to a compound comprising one or more IL-2Rβγc ligands bound to a construct partner. An IL-2Rβγc ligand construct also includes compounds in which one or more IL-2Rβ ligands and one or more IL-2Rγc ligands are bound to a construct partner.

[0086] An “IL-2Rβγc binding compound” refers to a compound capable of binding to both the IL-2Rβ and IL-2Rγc subunit and includes an IL-2Rβγc ligand, a tandem IL-2Rβγc ligand, an IL-2Rβγc ligand construct, and to a construct comprising an IL-2Rβ ligand and an IL-2Rγc ligand. An IL-2Rβγc binding compound can bind to both the IL-2Rβ subunit and the IL-2Rγc subunit with an IC50, for example, of less than 100 μM such as less than 10 μM, less than 1 μM, or less than 0.1 μM.

[0087] Bioisosteres are atoms or molecules that fit the broadest definition for isosteres. The concept of bioisosterism is based on the concept that single atom, groups, moieties, or whole molecules, which have chemical and physical similarities produce similar biological effects. A bioisostere of a parent compound can still be recognized and accepted by its appropriate target, but its functions will be altered as compared to the parent molecule. Parameters influenced by bioisosteric replacements include, for example, size, conformation, inductive and mesomeric effects, polarizability, capacity for electrostatic interactions, charge distribution, H-bond formation capacity, pKa (acidity), solubility, hydrophobicity, lipophilicity, hydrophilicity, polarity, potency, selectivity, reactivity, or chemical and metabolic stability, ADME (absorption, distribution, metabolism, and excretion). Although common in pharmaceuticals, carboxyl groups or carboxylic acid functional groups (—CO₂H) in a parent molecule may be replaced with a suitable surrogate or (bio)isostere to overcome chemical or biological shortcomings while retaining the desired attributes of the parent molecule bearing one or more carboxyl groups or carboxylic acid functional groups (—CO₂H). IL-2Rβγc ligands include bioisosteres of the IL-2Rβγc ligands provided by the present disclosure.

[0088] “Isostere” or “isostere replacement” refers to any amino acid or other analog moiety having physiochemical and/or structural properties similar to a specified amino acid. An “isostere” or “suitable isostere” of an amino acid is another amino acid of the same class, wherein amino acids belong to the following classes based on the propensity of the side chain to be in contact with polar solvent like water: hydrophobic (low propensity to be in contact with water), polar or charged (energetically favorable contact with water). Examples of charged amino acid residues include lysine (+), arginine (+), aspartate (−) and glutamate (−). Examples of polar amino acids include serine, threonine, asparagine, glutamine, histidine and tyrosine. Illustrative hydrophobic amino acids include alanine, valine, leucine, isoleucine, proline, phenylalanine, tryptophan, cysteine and methionine. The amino acid glycine does not have a side chain and is difficult to assign to one of the above classes. However, glycine is often found at the surface of proteins, often within loops, providing high flexibility to these regions, and an isostere may have a similar feature. Proline has the opposite effect, providing rigidity to the protein structure by imposing certain torsion angles on the segment of the polypeptide chain. An isostere can be a derivative of an amino acid, e.g., a derivative having one or more modified side chains as compared to the reference amino acid. IL-2Rβγc ligands include isosteres of the IL-2Rβγc ligands provided by the present disclosure.

[0089] “Cyclized” refers to a reaction in which one part of a peptide or polypeptide molecule becomes linked to another part of the peptide or polypeptide molecule to form a closed ring, such as by forming a disulfide bridge or other similar bond, e.g., a lactam bond. In particular embodiments, peptide monomer compounds or monomer subunits of peptide dimer compounds described herein are cyclized via an intramolecular bond between two amino acid residues present in the peptide monomer or monomer subunit. A peptide such as an IL-2Rβγc ligand can include cysteines that are bound together through disulfide bonds and thereby are cyclized IL-2Rβγc ligands.

[0090] “Patient” refers to a mammal, for example, a human.

[0091] “Peptide” refers to a polymer in which the monomers include amino acids joined together through amide bonds. A peptide can comprise, for example, less than 200 amino acids, less than 100 amino acids, less than 50 amino acids, less than 40 amino acids, less than 30 amino acids, or less than 20 amino acids. A peptide can comprise naturally occurring amino acids, non-naturally occurring amino acids, or a combination thereof.

[0092] In addition to peptides consisting only of naturally occurring amino acids, peptidomimetics or peptide analogs are also provided. Peptide mimetics that are structurally similar to therapeutically useful peptides may be used to produce an equivalent or enhanced therapeutic or prophylactic effect. Generally, peptidomimetics are structurally similar to a paradigm peptide, for example, a peptide that has a biological or pharmacological activity, such as a naturally-occurring receptor-binding peptide, but have one or more peptide linkages optionally replaced by a linkage such as —CH₂—NH—, —CH₂—S—, —CH₂—CH₂—, —CH═CH— (cis and trans), —COCH₂—, —CH(OH)CH₂—, and —CH₂SO—, by methods known in the art.

[0093] Substitution of one or more amino acids of a consensus sequence with a D-amino acid of the same type, such as D-lysine in place of L-lysine, may be used to generate more stable peptides. In addition, constrained peptides comprising a consensus sequence, or a substantially identical consensus sequence variation may be generated by methods known in the art; for example, by adding internal cysteine residues capable of forming intramolecular disulfide bridges which cyclize the peptide.

[0094] Synthetic or non-naturally occurring amino acids refer to amino acids that do not naturally occur in vivo but which, nevertheless, can be incorporated into the peptide ligands provided by the present disclosure. Suitable examples of synthetic amino acids include the D-α-amino acids of naturally occurring L-α-amino acid as well as non-naturally occurring D- and L-α-amino acids represented by the formula H₂NCHR⁵COOH where R⁵ is C₁₋₆ alkyl, C₃₋₈ cycloalkyl, C₃₋₈ heterocycloalkyl; an aromatic residue of from 6 to 10 carbon atoms optionally having from 1 to 3 substituents on the aromatic nucleus selected from hydroxyl, lower alkoxy, amino, and carboxyl; -alkylene-Y where alkylene is an alkylene group of from 1 to 7 carbon atoms and Y is selected from a hydroxyl, amino, cycloalkyl, and cycloalkenyl having from 3 to 7 carbon atoms; aryl of from 6 to 10 carbon atoms, such as from 1 to 3 substituents on the aromatic nucleus selected hydroxyl, lower alkoxy, amino and carboxyl; heterocyclic of from 3 to 7 carbon atoms and 1 to 2 heteroatoms selected from oxygen, sulfur, and nitrogen; —C(O)R² where R² is selected from hydrogen, hydroxy, lower alkyl, lower alkoxy, and —NR³R⁴ where each of R³ and R⁴ is independently selected from hydrogen and lower alkyl; —S(O)ₙR⁶ where n is 1 or 2 and R⁶ is C₁₋₆ alkyl, and with the proviso that R⁶ does not define a side chain of a naturally occurring amino acid.

[0095] Examples of other synthetic amino acids include amino acids in which the amino group is separated from the carboxyl group by more than one carbon atom such as β-alanine and γ-aminobutyric acid.

[0096] Examples of suitable synthetic amino acids include the D-amino acids of naturally occurring L-amino acids, L-1-naphthyl-alanine, L-2-naphthylalanine, L-cyclohexylalanine, L-2-amino isobutyric acid, the sulfoxide and sulfone derivatives of methionine, i.e., HOOC—(H₂NCH)CH₂CH₂—S(O)ₙR, where n and R are as defined above as well as the lower alkoxy derivative of methionine, i.e., HOOC—(H₂NCH)CH₂CH₂OR where R is as defined above.

[0097] “N-terminus” refers to the end of a peptide or polypeptide, such as an N-terminus of an IL-2Rβγc ligand, an IL-2Rβγc ligand construct, an IL-2Rβ ligand, or an IL-2Rγc ligand, that bears an amino group in contrast to the carboxyl end bearing a carboxylic acid group.

[0098] “C-terminus” refers to the end of a peptide or polypeptide, such as a C-terminus of an IL-2Rβγc ligand, an IL-2Rβγc ligand construct, an IL-2Rβ ligand or an IL-2Rγc ligand, that bears a carboxylic acid group in contrast to the amino terminus bearing an amino group. In certain synthetic peptides, the N-terminus does not bear an amino group and/or the C-terminus does not bear a carboxyl group. In such cases the nomenclature refers to the direction of the peptide backbone.

[0099] “Pharmaceutically acceptable” refers to approved or approvable by a regulatory agency of the Federal or a state government or listed in the U.S. Pharmacopoeia or other generally recognized pharmacopoeia for use in animals, and more particularly in humans.

[0100] “Pharmaceutically acceptable salt” refers to a salt of a compound, which possesses a desired pharmacological activity of the parent compound. Such salts include acid addition salts, formed with inorganic acids and one or more protonate-able functional groups such as primary, secondary, or tertiary amines within the parent compound. Examples of inorganic acids include hydrochloric acid, hydrobromic acid, sulfuric acid, nitric acid, and phosphoric acid. A salt can be formed with organic acids such as, for example, acetic acid, propionic acid, hexanoic acid, cyclopentanepropionic acid, glycolic acid, pyruvic acid, lactic acid, malonic acid, succinic acid, malic acid, maleic acid, fumaric acid, tartaric acid, citric acid, benzoic acid, 3-(4-hydroxybenzoyl) benzoic acid, cinnamic acid, mandelic acid, methanesulfonic acid, ethanesulfonic acid, 1,2-ethane-disulfonic acid, 2-hydroxyethanesulfonic acid, benzenesulfonic acid, 4-chlorobenzenesulfonic acid, 2-naphthalenesulfonic acid, 4-toluenesulfonic acid, camphorsulfonic acid, 4-methylbicyclo[2.2.2]-oct-2-ene-1-carboxylic acid, glucoheptonic acid, 3-phenylpropionic acid, trimethylacetic acid, tertiary butylacetic acid, lauryl sulfuric acid, gluconic acid, glutamic acid, hydroxynaphthoic acid, salicylic acid, stearic acid, or muconic acid. A salt can be formed when one or more acidic protons present in the parent compound are replaced by a metal ion, e.g., an alkali metal ion, an alkaline earth ion, or an aluminum ion, or combinations thereof, or coordinates with an organic base such as ethanolamine, diethanolamine, triethanolamine, or N-methylglucamine. A pharmaceutically acceptable salt can be a hydrochloride salt. A pharmaceutically acceptable salt can be a sodium salt. A compound can have two or more ionizable groups, and a pharmaceutically acceptable salt can comprise one or more counterions, such as a bi-salt, for example, a dihydrochloride salt.

[0101] “Pharmaceutically acceptable salt” refers to hydrates and other solvates, as well as salts in crystalline or non-crystalline form. Where a particular pharmaceutically acceptable salt is disclosed, it is understood that the particular salt (e.g., a hydrochloride salt) is an example of a salt, and that other salts may be formed using techniques known to one of skill in the art. Additionally, a pharmaceutically acceptable salt to the corresponding compound, free base and/or free acid, using techniques generally known in the art. See also: Stahl and Wermuth, C. G. (Editors), Handbook of Pharmaceutical Salts, Wiley-VCH, Weinheim, Germany, 2008.

[0102] “Pharmaceutically acceptable vehicle” refers to a pharmaceutically acceptable diluent, a pharmaceutically acceptable adjuvant, a pharmaceutically acceptable excipient, a pharmaceutically acceptable carrier, or a combination of any of the foregoing with which a compound provided by the present disclosure may be administered to a patient and which does not destroy the pharmacological activity thereof and which is non-toxic when administered in doses sufficient to provide a therapeutically effective amount of the compound.

[0103] “Solvate” refers to a molecular complex of a compound with one or more solvent molecules in a stoichiometric or non-stoichiometric amount. Such solvent molecules are those commonly used in the pharmaceutical arts, which are known to be innocuous to a patient, e.g., water, ethanol, and the like. A molecular complex of a compound or moiety of a compound and a solvent can be stabilized by non-covalent intra-molecular forces such as, for example, electrostatic forces, van der Waals forces, or hydrogen bonds. The term “hydrate” refers to a solvate in which the one or more solvent molecules is water.

[0104] “Pharmaceutical composition” refers to an IL-2Rβγc binding compound provided by the present disclosure such as IL-2Rβγc ligands or a pharmaceutically acceptable salt thereof and IL-2Rβγc ligand constructs or a pharmaceutically acceptable salt thereof and at least one pharmaceutically acceptable vehicle with which the IL-2Rβγc binding compound or a pharmaceutically acceptable salt thereof is administered to a patient.

[0105] “Preventing” or “prevention” refers to a reduction in risk of acquiring a disease or disorder such as, for example causing at least one of the clinical symptoms of the disease not to develop in a patient that may be exposed to or predisposed to the disease but does not yet experience or display symptoms of the disease. In some embodiments, “preventing” or “prevention” refers to reducing symptoms of the disease by taking the compound in a preventative fashion.

[0106] “Therapeutically effective amount” refers to the amount of a compound that, when administered to a patient for treating a disease, or at least one of the clinical symptoms of a disease, is sufficient to treat the disease or symptom thereof. A “therapeutically effective amount” may vary depending, for example, on the compound, the disease and/or symptoms of the disease, severity of the disease and/or symptoms of the disease or disorder, the age, weight, and/or health of the patient to be treated, and the judgment of a prescribing physician. An appropriate amount in any given instance may be ascertained by those skilled in the art or capable of determination by routine experimentation.

[0107] “Therapeutically effective dose” refers to a dose that provides effective treatment of a disease or disorder in a patient. A therapeutically effective dose may vary from compound to compound, and from patient to patient, and may depend upon factors such as the condition of the patient and the route of delivery. A therapeutically effective dose may be determined in accordance with routine pharmacological procedures known to those skilled in the art.

[0108] “Treating” or “treatment” of a disease refers to arresting or ameliorating a disease or at least one of the clinical symptoms of a disease or disorder, reducing the risk of acquiring a disease or at least one of the clinical symptoms of a disease, reducing the development of a disease or at least one of the clinical symptoms of the disease or reducing the risk of developing a disease or at least one of the clinical symptoms of a disease. “Treating” or “treatment” also refers to inhibiting the disease, either physically, (e.g., stabilization of a discernible symptom), physiologically, (e.g., stabilization of a physical parameter), or both, and to inhibiting at least one physical parameter or manifestation that may or may not be discernible to the patient. In certain embodiments, “treating” or “treatment” refers to delaying the onset of the disease or at least one or more symptoms thereof in a patient who may be exposed to or predisposed to a disease or disorder even though that patient does not yet experience or display symptoms of the disease.

[0109] “Tregs” or “Treg cells” refer to regulatory T-cells. Regulatory T-cells are a class of T-cells that suppress the activity of other immune cells and are defined using flow cytometry by the cell marker phenotypes CD4+/CD25+/FOXP3+, CD4+CD25+CD127lo, or CD4+/CD25+/FOXP3+/CD127lo. Because FOXP3 is an intracellular protein and requires cell fixation and permeabilization for staining, the cell surface phenotype CD4+CD25+CD127lo− can be used for defining live Tregs. Tregs also include various Treg subclasses, such as tTregs (thymus-derived) and pTregs (peripherally derived, differentiated from naive T-cells in the periphery). Tregs play a critical role in the induction and maintenance of peripheral self-tolerance to antigens, including those expressed by tumors. “CD4+ T cells” are a type of lymphocyte that functions to coordinate the immune response by stimulating other immune cells such as macrophages, B lymphocytes (B cells), CD8 lymphocytes (CD8 cells) to fight infection. CD4+ T cells recognize peptides presented on MHC Class II molecules, which are found on antigen-presenting cells.

[0110] As with CD4+ T cells, “CD8+ (cytotoxic) T-cells” are generated in the thymus and express the T-cell receptor. Cytotoxic T-cells express a dimeric co-receptor, CD8, which typically comprises one CD8a and one CD80 chain. CD8+ T-cells recognize peptides presented by MHC Class 1 molecules found on most nucleated cells. The CD8 heterodimer binds to a conservative portion of MHC Class 1 during T-cell/antigen presenting cell interactions. CD8+ T-cells (cytotoxic T lymphocytes, or CTLs) are important for immune defense against intracellular pathogens including viruses and bacteria, and for tumor surveillance.

[0111] “NK (natural killer) cells” are lymphocytes of the innate immune system and are classified as group I innate lymphocytes (ILCs). NK cells respond to a wide variety of pathological challenges including by killing virally infected cells and detecting and controlling early signs of cancer.

[0112] “Functional activation of cells” refers to an IL-2-mediated response in cells such as, for example, T-cells and NK cells. Assays for functional activation of cells include stimulation of pSTAT5, cell proliferation or markers of proliferation (such as Ki67), change in immune cell type ratios, and stimulation of the levels of effector proteins.

[0113] “Effector cells” refers to a population of lymphocytes that mediate the helper (CD4+ cells) and cytotoxic (CD8+ and NK cells) effects. Effector cells include effector T-cells such as CD4+ helper T-cells, CD8+ cytotoxic T-cells, NK cells, lymphokine-activated killer (LAK) cells and macrophages/monocytes.

[0114] “Naïve T-cells” refer to T-cells that have differentiated in bone marrow and undergone the positive and negative processes of central selection in the thymus. Naïve T-cells include naïve forms of helper T cells, CD4+ T-cells) and naïve cytotoxic T-cells (CD8+ T-cells). Naive T-cells are commonly characterized by the surface expression of L-selectin (CD62L) and C—C chemokine receptor type 7 (CCR7) and the expression of IL-7R (CD127) and the absence of the activation markers CD25, CD44, and CD69.

[0115] “Memory T-cells” are a subset of T lymphocytes including both CD4+ and CD8+. The primary function of memory T-cells is rapid augmented immune response after reactivation of those cells by reintroduction of a relevant antigen or pathogen into the body.

[0116] “Antigen binding moiety” refers to a polypeptide molecule that specifically binds to an antigenic determinant. An antigen binding moiety can direct, for example, the entity to which it is attached, such as a cytokine or a second antigen binding moiety, to a target site, for example, to a specific type of tumor cell or tumor stroma bearing the antigenic determinant. Antigen binding moieties include antibodies and fragments thereof. Examples of antigen binding moieties include an antigen binding domain of an antibody comprising an antibody heavy chain variable region and an antibody light chain variable region. An antigen binding moiety can include antibody constant regions. Useful heavy chain constant regions can include any of the five isotypes: α, δ, ε, γ, or μ. Useful light chain constant regions can include any of the two isotypes K and A.

[0117] “Polypeptide” refers to a molecule composed of monomers (amino acids) linearly linked by amide bonds (also known as peptide bonds). The term “polypeptide” refers to any chain of two or more amino acids and does not refer to a specific length of the product. Thus, peptides, dipeptides, tripeptides, oligopeptides, “protein,” “amino acid chain,” or any other term used to refer to a chain of two or more amino acids, are included within the definition of “polypeptide,” and the term “polypeptide” may be used instead of, or interchangeably with any of these terms. The term “polypeptide” is also intended to refer to the products of post-expression modifications of the polypeptide including, for example, glycosylation, acetylation, phosphorylation, amidation, derivatization by known protecting/blocking groups, proteolytic cleavage, and/or modification by non-naturally occurring amino acids. A polypeptide may be derived from a natural biological source or produced by recombinant technology but is not necessarily translated from a designated nucleic acid sequence. A polypeptide may be generated in any manner, including by recombinant methods or by chemical synthesis. A polypeptide may have, for example, more than 100 amino acids, more than 200 amino acids, more than 500 amino acids, more than 1,000 amino acids, or more than 2,000 amino acids. Polypeptides may have a defined three-dimensional structure, although they do not necessarily have such structure. Polypeptides with a defined three-dimensional structure are referred to as folded, and polypeptides which do not possess a defined three-dimensional structure, but rather can adopt a large number of different conformations and are referred to as unfolded.

[0118] “Polynucleotide” refers to an isolated nucleic acid molecule or construct, e.g., messenger RNA (mRNA), virally derived RNA, or plasmid DNA (pDNA). A polynucleotide may comprise a conventional phosphodiester bond or a non-conventional bond, such as an amide bond, such as found in peptide nucleic acids (PNA).

[0119] “Nucleic acid molecule” refers to any one or more nucleic acid segments, such as DNA or RNA fragments, present in a polynucleotide.

[0120] “Vector” or “expression vector” is synonymous with “expression construct” and refers to a DNA molecule that is used to introduce and direct the expression of a specific gene to which it is operably associated in a target cell. A vector can be a self-replicating nucleic acid structure as well as a vector incorporated into the genome of a host cell into which it has been introduced. An expression vector can comprise an expression cassette. Expression vectors allow transcription of large amounts of stable mRNA. Once an expression vector is inside the target cell, the ribonucleic acid molecule or protein that is encoded by the gene is produced by the cellular transcription and/or translation machinery. An expression vector can comprise an expression cassette that comprises polynucleotide sequences that encode an IL-2Rβγc binding compound provided by the present disclosure such as an IL-2Rβγc ligand or IL-2Rβγc ligand construct provided by the present disclosure.

[0121] “Host cell,” “host cell line,” and “host cell culture” refer to cells into which are exogenous nucleic acid has been introduced, including the progeny of such cells. Host cells include, for example, “transformants” and “transformed cells,” which include the primary transformed cell and progeny derived from the primary transformed cell without regard to the number of passages.

[0122] “Antibody” in the broadest sense encompasses various antibody structures including, for example, monoclonal antibodies, polyclonal antibodies, multi-specific antibodies such as bispecific antibodies, and antibody fragments that exhibit a desired antigen binding activity. The term “antibody” can be abbreviated as “ab” such as in the expression Fab or anti-phage Ab.

[0123] “Full-length antibody,” “intact antibody,” and “whole antibody” refer to an antibody having a structure substantially similar to a native antibody structure or having heavy chains that contain both Fab and an Fe region.

[0124] “Antibody fragment” refers to a molecule other than an intact antibody that comprises a portion of an intact antibody that binds the antigen to which the intact antibody binds. Examples of antibody fragments include Fv, Fab, Fab′, Fab′-SH, F(ab′)2, diabodies, linear antibodies, single-chain antibody molecules such as scFv, and multi-specific antibodies formed from antibody fragments. Diabodies are antibody fragments with two antigen binding sites that may be bivalent or bispecific. Antibody fragments can be made by various techniques, including but not limited to proteolytic digestion of an intact antibody as well as production by recombinant host cells such as E. coli or phage.

[0125] “Fab” or “Fab region” refers to a polypeptide that comprises the VH, CHI, VL, and CL immunoglobulin domains, generally on two different polypeptide chains such as VH-CHl on one chain and VL-CL on the other. Fab may refer to this region in isolation, or this region in the context of a bispecific antibody. In the context of a Fab, the Fab comprises an Fv region in addition to the CHI and CL domains.

[0126] “Fv” or “Fv fragment” or “Fv region” refers to a polypeptide that comprises the VL and VH domains of an ABD. Fv regions can be formatted as both Fabs (generally two different polypeptides that also include the constant regions) and scFvs, where the vi and vh domains are combined (generally with a linker as discussed) to form an scFv.

[0127] “Single chain Fv” or “scFv” refers to a variable heavy domain covalently attached to a variable light domain, generally using a scFv linker as discussed herein, to form a scFv or scFv domain. A scFv domain can be in either orientation with the VL domain at the N- or C-terminus of the polypeptide, and conversely for the VH domain.

[0128] “Effector function” refers to a biochemical event that results from the interaction of an antibody Fc region with an Fc receptor or ligand. Effector functions include, for example, antibody-dependent cellular toxicity (ADCC), antibody-dependent cellular phagocytosis (ADCP), and complement-dependent cytotoxicity (CDC).

[0129] “Fc” or “Fe region” or “Fc chain” refers to polypeptide comprising the constant region of an antibody, in some instances, excluding all or a portion of the first constant region immunoglobulin domain (e.g., CHI) or a portion thereof, and in some cases, further excluding all or a portion of the hinge. Thus, an Fe can refer to the last two constant region immunoglobulin domains (e.g., CH2 and CH3) of lgA, IgD, and IgG, the last three constant region immunoglobulin domains of IgE and IgM, and optionally, all or a portion of the flexible hinge N-terminal to these domains. For IgA and IgM, Fe may include the J chain. For IgG, the Fc chain comprises immunoglobulin domains CH2 and CH3 (Cy2 and Cy3), and optionally all or a portion of the hinge region between CHI (Cyl) and CH2 (Cy2). Although the boundaries of the Fe region may vary, the human IgG heavy chain Fe region is usually defined to include residues E216, C226, or A231 to its carboxyl-terminus, wherein the numbering is according to the EU index as in Kabat. An amino acid modification can be made to the Fe region, for example to alter binding to one or more FeyR or to the FcRn. In EU numbering for human IgG1, the CH2-CH3 domain comprises amino acids 231 to 447, and the hinge is 216 to 230. Thus, the definition of Fc chain includes both amino acids 231-447 (CH2-CH3) or 216-447 (hinge-CH2-CH3), or fragments thereof. An Fe fragment can contain fewer amino acids from either or both of the N- and C-termini that retains the ability to form a dimer with another Fc chain or Fe fragment as can be detected using standard methods, generally based on size (e.g., non-denaturing chromatography, size exclusion chromatography, etc.). Human IgG Fc chains are of particular use, and can be the Fc chain from human IgG1, IgG2 or IgG4.

[0130] “Heavy constant region” refers to the CH1-hinge-CH2-CH3 portion of an antibody or fragments thereof, excluding the variable heavy domain; in EU numbering of human IgG1, such as amino acids 118-447.

[0131] “Heavy chain constant region fragment” refers to a heavy chain constant region that contains fewer amino acids from either or both of the N- and C-termini that retains the ability to form a dimer with another heavy chain constant region.

[0132] “Immunoglobulin” refers to a protein having the structure of a naturally occurring antibody. For example, immunoglobulins of the IgG class are heterotetrameric glycoproteins of about 150,000 Da, composed of two light chains and two heavy chains that are bonded together through disulfide bonds. From N- to C-terminus, each heavy chain has a variable region (VH), also called a variable heavy domain or a heavy chain variable domain, followed by three constant domains (CHI, CH2, and CH3), also called a heavy chain constant region. Similarly, from N- to C-terminus, each light chain has a variable region (VL), also called a variable light domain or a light chain variable domain, followed by a constant light (CL) domain, also called a light chain constant region. The heavy chain of an immunoglobulin may be assigned to one of five classes, called a (IgA), Ii (IgD), E (IgE), y (IgG), or μ(IgM), some of which may be further divided into subclasses, e.g., γ1 (IgG1), γ2 (IgG2), γ3 (IgG3), γ4(gG4), α1 (IgA1) and α2 (IgA2). The light chain of an immunoglobulin may be assigned to one of two types, kappa (κ) or lambda (L), based on the amino acid sequence of its constant domain. An immunoglobulin essentially consists of two Fab molecules and an Fc chain, linked via the immunoglobulin hinge region.

[0133] “Immunoconjugate” refers to a polypeptide molecule that includes at least one IL-2Rβγc ligand and at least one antigen binding moiety. An immunoconjugate can comprise at least one IL-2Rβγc ligand, and at least two antigen binding moieties. An immunoconjugate can comprise at least one IL-2Rβγc ligand and two antigen binding moieties joined by one or more linker sequences. An antigen binding moiety can be joined to the IL-2Rβγc ligand by a variety of interactions and in a variety of configurations. For example, an IL-2Rβγc ligand can be bound to an antigen binding moiety through a linker.

[0134] “Linker” refers to a moiety that binds one compound to another compound. Linkers can include IL-2Rβγc ligand linkers, tandem IL-2Rβγc ligand linkers, and IL-2Rβγc ligand construct linkers. A linker can be a synthetic linker. A linker can be an amino acid linker. For example, linkers provided by the present disclosure can facilitate the ability of an IL-2Rβγc ligand to interact with IL-2R, to bind to IL-2R with low IC₅₀, and/or to activate IL-2R. A linker can comprise a peptide or a non-peptide. Non-peptide linkers include those containing, for example, a triazole moiety derived from a Cu(I)-catalyzed reaction of alkyne and azide functionalities. An IL-2Rβγc ligand linker refers to a moiety that binds at least one IL-2R ligand such as an IL-2Rβ ligand and/or an IL-2Rγc ligand to another IL-2R ligand. A linker can bind to another IL-2R ligand which can be the same IL-2R ligand or a different IL-2R ligand. A linker can also bind to one or more additional moieties that provide a desired physiological function. A linker can be divalent or multivalent. A linker can be hydrolytically stable or may include a physiologically hydrolyzable or enzymatically degradable or cleavable linkage. A linker can bind IL-2R ligands to form dimers, trimers, or higher order multi-ligand peptides (heteromers) and compounds.

[0135] A “flexible linker” refers to a peptidyl linker comprising flexible amino acids such as glycine and serine. A flexible linker can comprise, for example, from 1 to 100 amino acids such as from 1 to 50, from 1 to 40, from 1 to 30, from 1 to 20, from 1 to 10, or from 1 to 5 amino acids, where each amino acid is independently selected from glycine and serine. Examples of flexible linkers include (G). (SEQ ID NO: 9380), (GS)ₙ (SEQ ID NO: 9381), (GGS)ₙ (SEQ ID NO: 9382), (GGGS)ₙ (SEQ ID NO: 9383), or (GGGGS)ₙ (SEQ ID NO: 9384) where n can be an integer from 1 to 20; (G)ₙ (SEQ ID NO: 9385), (GS)ₙ (SEQ ID NO: 9386), (GGS)ₙ (SEQ ID NO: 9387), (GGGS)ₙ (SEQ ID NO: 9388), or (GGGGS)ₙ (SEQ ID NO: 9389) where n can be an integer from 1 to 10; or (G)ₙ (SEQ ID NO: 9390), (GS)ₙ (SEQ ID NO: 9391), (GGS)ₙ (SEQ ID NO: 9392), (GGGS)ₙ (SEQ ID NO: 9393), or (GGGGS)ₙ (SEQ ID NO: 9394) where n can be an integer from 1 to 5. (A flexible linker can have the amino acid sequence, for example, (GGGGS) (SEQ ID NO: 9395), (GGGGS)₂ (SEQ ID NO: 9396), (GGGGS)₃ (SEQ ID NO: 9397), (GGGGS)₄ (SEQ ID NO: 9398), (GG) (SEQ ID NO: 9399), (GGG) (SEQ ID NO: 9400), (GGGGG) (SEQ ID NO: 9401), (GGS) (SEQ ID NO: 9402), (GGGS) (SEQ ID NO: 9403), (GGGGSGG) (SEQ ID NO: 9404), (GGS)2 (SEQ ID NO: 9405), (G)5 (SEQ ID NO: 9406), or (GS)10 (SEQ ID NO: 9407).

[0136] A “rigid linker” refers to a peptidyl linker that is proline rich and can include other amino acids such as alanine, lysine, and/or glutamic acid. A rigid linker can comprise, for example, from 1 to 100 amino acids such as from 1 to 50, from 1 to 40, from 1 to 30, from 1 to 20, from 1 to 10, or from 1 to 5 amino acids, where each amino acid is independently selected from proline, alanine, lysine, and glutamic acid. A rigid linker can comprise, for example, from 1 to 100 amino acids such as from 1 to 50, from 1 to 40, from 1 to 30, from 1 to 20, from 1 to 10, or from 1 to 5 amino acids, where each amino acid is independently selected from proline and alanine. A rigid linker can have the sequence (P)ₙ (SEQ ID NO: 9420) or (PA)ₙ (SEQ ID NO: 9421), where n is an integer from 1 to 20. A rigid linker can have the sequence (P)ₙ (SEQ ID NO: 9422) or (PA)ₙ (SEQ ID NO: 9423), where n is an integer from 1 to 10. A rigid linker can have the sequence (P)ₙ (SEQ ID NO: 9424) or (PA)ₙ (SEQ ID NO: 9425), where n is an integer from 1 to 5. A rigid linker can have the sequence (PA)₅ (SEQ ID NO: 9426), (PA)₇ (SEQ ID NO: 9427), or (PA)₁₀ (SEQ ID NO: 9428).

[0137] “Protein” refers to at least two covalently attached amino acids, which includes proteins, polypeptides, oligopeptides and peptides. In addition, polypeptides that make up the antibodies may include synthetic derivatization of one or more side chains or termini, glycosylation, PEGylation, circular permutation, cyclization, linkers to other molecules, fusion to proteins or protein domains, and addition of peptide tags or labels. When a biologically functional molecule comprises two or more proteins, each protein may be referred to as a “monomer” or as a “subunit” or as a “domain”; and the biologically functional molecule may be referred to as a “complex”.

[0138] “Binding affinity” refers to the strength of the binding interaction between a single biomolecule and its ligand/binding partner. Binding affinity is expressed as the IC₅₀. For example, binding affinity of an IL-2Rβγc binding compound refers to the IC₅₀ as determined using, for example, a method described in the examples.

[0139] “Amino acid sequence similarity” refers to an amino acid sequence in which one or more amino acids of the amino has been replaced with a chemically similar amino acid. Examples of chemically similar amino acids include (a) amino acids having a small hydrophobic side chain such as alanine (A), glycine (G), proline (P), serine (S), or threonine (T); (b) amino acids having a hydroxyl-containing side chain such as serine (S), threonine (T), or tyrosine (Y); (c) amino acids having an acidic side chain such as aspartate (D) or glutamate (E); (d) amino acids having a polar-neutral side chain such as histidine (H), asparagine (N), glutamine (Q), serine (S), threonine (T), or tyrosine (Y); (e) amino acids having a basic side chain such as arginine (R), lysine (K), or histidine (H); (f) amino acids having a large hydrophobic side chain such as isoleucine (I), leucine (L), methionine (M), valine (V), phenylalanine (F), tyrosine (Y), or tryptophan (W); and (g) amino acids having an aromatic side chain comprising phenylalanine (F), histidine (H), tryptophan (W), or tyrosine (Y). A chemically similar amino acid can comprise a naturally occurring amino acid or a non-natural amino acid.

[0140] “Percent (%) sequence similarity” is determined by comparing the number of amino acids that are the same in a subject ligand and a reference ligand. A ligand provided by the present disclosure can comprise, for example, greater than 70%, greater than 80%, or greater than 90% sequence similarity to a reference ligand. For example, based on a reference ligand having SEQ ID NO: 9001, ligands having SEQ ID NOS: 9002-9007, have either 1, 2, 3, 4, or 5 amino acid in which an amino acid of the reference ligand has been substituted or replaced with the amino acid, alanine. Ligands having SEQ ID NOS: 9002-9007 are characterized by a 95%, 90%, 85%, 80%, 75%, or 70% sequence similarity, respectively, to the reference ligand.

SEQ ID NO: 9001
Y P C W L A R V G E L C D L D S G D V H
SEQ ID NO: 9002
A P C W L A R V G E L C D L D S G D V H
SEQ ID NO: 9003
A P C A L A R V G E L C D L D S G D V H
SEQ ID NO: 9004
A P C A L A A V G E L C D L D S G D V H
SEQ ID NO: 9005
A P C A L A A V G A L C D L D S G D V H
SEQ ID NO: 9006
A P C A L A A V G A L C D L A S G D V H
SEQ ID NO: 9007
A P C A L A A V G A L C D L A A G D V H

[0141] For example, an IL-2Rβγc binding compound provided by the present disclosure such as an IL-2Rβγc ligand or can have an amino acid sequence in which, for example, from 1 to 10 amino acids or from 1 to 5 amino acids of a reference amino acid sequence is substituted with another amino acid.

[0142] For example, a binding compound derived from a reference binding compound can have from 1 to 5 amino acid substitutions, from 1 to 4, from 1 to 3, or from 1 to 2 amino acid substitutions. For example, a binding compound derived from a reference binding compound can have 1 amino acid substitution, 2 amino acid substitutions, 3 amino acid substitutions, 4 amino acid substitutions, or 5 amino acid substitutions.

[0143] An amino acid substitution can be independent of other amino acid substitutions.

[0144] Each amino acid substitution can independently be a conservative amino acid substitution or a non-conservative amino acid substitution.

[0145] For example, a reference ligand can have the amino acid sequence of SEQ ID NO: 9011. Ligands having SEQ ID NOS: 9012-9016 represent substituted ligands in which the reference ligand having SEQ ID NO: 9011 has been substituted with from 1 to 5 conservative amino acid substitutions, respectively.

SEQ ID NO: 9011
Y W C W M A Q V G E L C D L
SEQ ID NO: 9012
Y H C W M A Q V G E L C D L
SEQ ID NO: 9013
Y H C W M G Q V G E L C D L
SEQ ID NO: 9014
Y H C W M G Q M G E L C D L
SEQ ID NO: 9015
Y H C W M G Q M G E L C E L
SEQ ID NO: 9016
Y H C W M G Q M G E L C E M

[0146] An IL-2Rβγc binding compound such as an IL-2Rβγc ligand construct provided by the present disclosure can have, for example, greater than 80%, greater than 85%, greater than 90%, greater than 95%, greater than 96%, greater than 98%, or greater than 99% sequence similarity to an IL-2Rβγc binding compound such as an IL-2Rβγc ligand construct identified by a specific SEQ ID NO: provided by the present disclosure.

[0147] A ligand provided by the present disclosure such as an IL-2Rβ ligand, an IL-2Rγc ligand, and an IL-2Rβγc ligand can comprise a truncated ligand. A “truncated ligand” refers to a ligand in which, for example, from 1 to 10 or from 1 to 5 amino acids have independently been removed from the N-terminus, the C-terminus, or from both the N-terminus and the C-terminus of the corresponding reference ligand. A truncated ligand derived from the corresponding reference ligand can independently have, for example from 1 to 5 amino acids, such as from 1 to 4 amino acids, from 1 to 3 amino acids, or from 1 to 2 amino acids independently removed from the N-terminus, the C-terminus, or from both the N-terminus and the C-terminus of the reference ligand. A truncated ligand derived from the corresponding ligand can independently have, for example, 1 amino acid, 2 amino acids, 3 amino acids, 4 amino acids, or 5 amino acids removed from the N-terminus, the C-terminus, or from both the N-terminus and the C-terminus of the reference ligand.

[0148] For example, a reference ligand can have the amino acid sequence of SEQ ID NO: 9021. Examples of truncated ligands derived from the reference ligand having SEQ ID NO: 9021 include truncated ligands having an amino acid sequence of SEQ ID NOS: 9022-9029.

```
SEQ ID NO: 9021
M G F Y P C W T A Q L G E L C D L S V D
SEQ ID NO: 9022
    G F Y P C W T A Q L G E L C D L S V D
SEQ ID NO: 9023
        F Y P C W T A Q L G E L C D L S V D
SEQ ID NO: 9024
            Y P C W T A Q L G E L C D L S V D
SEQ ID NO: 9025
M G F Y P C W T A Q L G E L C D L S V
SEQ ID NO: 9026
M G F Y P C W T A Q L G E L C D L S
SEQ ID NO: 9027
M G F Y P C W T A Q L G E L C D L
SEQ ID NO: 9028
    G F Y P C W T A Q L G E L C D L S V
SEQ ID NO: 9029
        F Y P C W T A Q L G E L C D L
```

[0149] The truncated ligands of SEQ ID NOS: 9022-9024 have from 1 to 3 amino acids removed from the N-terminus of the reference ligand, respectively; truncated binding compounds ligands having SEQ ID NOS: 9025 to 9027 have from 1 to 3 amino acids removed from the C-terminus of the reference ligand, respectively; and truncated ligands having SEQ ID NOS: 9028 and 9029 have amino acids removed from both the N-terminus and from the C-terminus of the reference ligand.

[0150] As another example, a reference ligand can comprise an amino acid sequence of Formula (A):

-X¹-X²-C-X³-X⁴-X⁵-X⁶-X⁷-X⁸-X⁹-X¹⁰-C-X¹¹-X¹²- (A)
[0151] where each -X- independently represents an amino acid. Amino acid sequences of Formula (A1)-(A5) represent examples of truncated ligands derived from the reference ligand comprising the amino acid sequence of Formula (A):

-X²-C-X³-X⁴-X⁵-X⁶-X⁷-X⁸-X⁹-X¹⁰-C-X¹¹-X¹²- (A1)

-C-X³-X⁴-X⁵-X⁶-X⁷-X⁸-X⁹-X¹⁰-C-X¹¹-X¹²- (A2)

-C-X³-X⁴-X⁵-X⁶-X⁷-X⁸-X⁹-X¹⁰-C- (A3)

-X³-X⁴-X⁵-X⁶-X⁷-X⁸-X⁹-X¹⁰-C-X¹¹- (A4)

-X³-X⁴-X⁵-X⁶-X⁷-X⁸-X⁹-X¹⁰- (A5)

[0152] A ligand provided by the present disclosure can comprise, for example, an amino acid sequence in which from 1 to 3 flanking amino acids such as glycines are independently bonded to the N-terminus, to the C-terminus, or to both the N-terminus and to the C-terminus of a reference ligand.

[0153] For example, a reference ligand can have SEQ ID NO: 9031. Ligands having SEQ ID NOS: 9032-9034 have from 1 to 3 glycines bonded to the N-terminus of the reference ligand, respectively; ligands having SEQ ID NOS: 9035-9037 have from 1 to 3 glycines bonded to the C-terminus of the reference ligand, respectively; and ligands having SEQ ID NOS: 9038 and 9039 have 1 or 2 glycines bonded to both the N-terminus and to the C-terminus of the reference ligand.

```
SEQ ID NO: 9031
            K Y C G F A Q L G E L C V L
SEQ ID NO: 9032
        G K Y C G F A Q L G E L C V L
SEQ ID NO: 9033
    G G K Y C G F A Q L G E L C V L
SEQ ID NO: 9034
G G G K Y C G F A Q L G E L C V L
SEQ ID NO: 9035
            K Y C G F A Q L G E L C V L G
SEQ ID NO: 9036
            K Y C G F A Q L G E L C V L G G
SEQ ID NO: 9037
            K Y C G F A Q L G E L C V L G G G
SEQ ID NO: 9038
        G K Y C G F A Q L G E L C V L G
SEQ ID NO: 9039
    G G K Y C G F A Q L G E L C V L G
```

[0154] A ligand provided by the present disclosure can comprise, for example, one or more flanking amino acids such as, for example, flanking glycine groups on the N-terminus and/or the C-terminus of the respective ligand. For example, a ligand can comprise one or more flanking amino acids having an amino acid sequence of any one of SEQ ID NOS: 9380-9407 and 9420-9428.

[0155] “IL-2Rβγc binding compound” refers to an IL-2Rβγc ligand provided by the present disclosure, a tandem IL-2Rβγc ligand provided by the present disclosure, an IL-2Rβγc ligand construct provided by the present disclosure, and a construct comprising at least one IL-2Rβ ligand and at least one IL-2Rγc ligand provided by the present disclosure. An IL-2Rβ binding compound can bind to both the IL-2Rβ subunit and to the IL-2Rγc subunit with an IC₅₀, for example, less than 100 μM, less than 10 μM, less than 1 μM, less than 0.1 μM, or less than 0.01 μM.

[0156] IL-2R, the IL-2Rβ subunit, and the IL-2Rγc subunit refer to mammalian IL-2R, the IL-2Rβ subunit, and the IL-2Rγc subunit, respectively, such as human IL-2R, the human IL-2Rβ subunit, and the human IL-2Rγc subunit, respectively.

[0157] The expression “at least one” refers to “one or more.” For example, the expression “at least one” can refer to from 1 to 10, from 1 to 8, from 1 to 6, from 1 to 5, from 1 to 4, from 1 to 3, or from 1 to 2. For example, the expression “at least one” can refer to 1, 2, 3, 4, 5, 6, 7, 8, 9, or 10.

[0158] Reference is now made in detail to certain embodiments of compounds, compositions, and methods. The disclosed embodiments are not intended to be limiting of the claims. To the contrary, the claims are intended to cover all alternatives, modifications, and equivalents.

[0159] Interleukin-2 (IL-2) plays a crucial role in regulating immune responses and maintaining peripheral self-tolerance by having both immuno-stimulatory and immuno-regulatory functions. IL-2 acts primarily as a T-cell growth factor and is essential for the proliferation and survival of T-cells as well as for the generation of effector and memory T-cells. IL-2 is a four α-helical bundle cytokine that belongs to a family of structurally related cytokines that includes IL-4, IL-7, IL-9, IL-15, and IL-21. IL-2 is produced by activated CD4+ T-cells in response to antigen stimulation and can also be produced by CD8+ T-cells and innate immune cells such as activated dendritic cells (DCs) and natural killer (NK) cells.

[0160] IL-2 binds to various forms of the IL-2 receptor (IL-2R), notably the monomeric, dimeric, and trimeric forms. Monomeric IL-2R consists of the membrane-associated IL-2Rα (CD25) chain, which also exists in a soluble form; however, IL-2Rα is not capable of inducing signaling events. The trimeric IL-2R consists of IL-2Rα, IL-2Rβ (CD122), and IL-2Rγc, also known as the common γ-chain (γc) or CD132 and is shared by all members of the IL-2 cytokine family. Dimeric IL-2R comprises the IL-2Rγc and IL-2Rβ subunits. In contrast to monomeric IL-2R, activation of both dimeric IL-2R and trimeric IL-2R leads to a downstream signaling cascade upon IL-2 binding. IL-2 binds with high affinity to trimeric IL-2R but with low-moderate affinity to dimeric IL-2R, varying with the sensitivity of the cell to IL-2. Additionally, IL-2 can bind to IL-2Rα expressed on the surface of activated dendritic cells for trans presentation to neighboring cells including antigen-specific naïve T-cells and NK cells that express both the IL-2Rβ and IL-2Rγc subunits. This trans presentation of IL-2 has been shown to facilitate initial high affinity IL-2 signaling, required early in the immune response to prime naïve T-cells to produce IL-2.

[0161] IL-2 is first captured by IL-2Rα, bringing about a conformational change to IL-2 and increasing its affinity for IL-2Rβ. Association of IL-2 with the IL-2Rβγc subunits induces the dimerization of the signaling motifs in the cytoplasmic tails of IL-2Rβ and IL-2Rγc leading to the phosphorylation/activation of the Janus kinases, JAK1 and JAK3, which in turn exert kinase activity on key tyrosine residues in the tail of the IL-2Rβ subunit.

[0162] Downstream signaling occurs via three major pathways, the JAK-STAT pathway, the phosphoinositide 3-kinase (PI3K)-AKT pathway, and the mitogen-activated protein kinase (MAPK) pathway. These pathways result in the transcription of target genes that contribute to IL-2-dependent biological actions through the recruitment of the adaptor protein Shc and the transcription factor STAT5. Target genes of IL-2 signaling include cyclin D2, bcl2, fasL, cd25 (encoding IL-2Rα), socs-2, and the IL-2 silencing gene prdm1, which encodes for the transcription factor, BLIMP1. The production of the negative regulator of IL-2 BLIMP1 maintains the balance between effector T-cells and Treg cells, which is important for immune homeostasis.

[0163] IL-2 plays a dual role in T-cell activation by stimulating the proliferation and differentiation of T-cells as well as by maintaining and expanding the population of immuno-suppressive Treg cells. Naïve CD4+ and CD8+ T-cells express the dimeric IL-2R, and therefore require a high concentration of IL-2 to induce their initial proliferation. Once activated, these T-cells express the high-affinity trimeric IL-2R, driving the differentiation of the T-cells into either effector (Teff) or memory cells. This differentiation depends on the strength and duration of the IL-2 signal.

[0164] During the primary expansion of CD8+ T-cells in the presence of low-to-moderate levels of IL-2, a subset of CD8+ T-cells differentiates into memory T-cells. The cells do this by downregulating CD25 and upregulating CD127 (IL-7R) and CD62 (L-selectin), which are receptors associated with secondary responses upon re-infection. During an acute infection, sustained high levels of IL-2 lead to a rapid up-regulation of CD25 and the differentiation of CD8+ cells into cytotoxic effector cells. The upregulation induces an IL-2-driven expression of the death receptor, fas and fasL, causing activation-induced cell death (AICD) upon pathogen clearance. For CD4+ T-cells, the activation of STAT5 signaling by IL-2 influences their differentiation into multiple helper T-cell populations, including Th1, Th2, and Th17 by regulating the expression of the appropriate receptors for each response.

[0165] Homeostatic or background levels of IL-2 are important for the survival and function of Treg cells by maintaining the expression of FOXP3 and CD25. Treg cells naturally occur in the thymus and upon contact with self-peptides become activated. Additionally, Treg cells can be generated by stimulation of conventional CD4+ T-cells upon interaction with antigens in peripheral lymphoid organs. Because Treg cells do not produce IL-2, Treg cells are dependent on IL-2-producing cells such as conventional T-cells. Due to their high expression of IL-2Rα (CD25), Tregs are able to consume and limit the systemic concentration of IL-2, ensuring regulation of the immune balance. In the absence of IL-2, the number of Treg cells decreases and the number of effector T-cells increases, leading to an enhanced susceptibility to autoimmune and inflammatory disorders. Therefore, the unique activation of Treg cells at low levels of IL-2, which does not activate CD4+ or CD8+ T-cells, has allowed for the development of IL-2 as a promising therapeutic in autoimmune and inflammatory diseases.

[0166] The production of IL-2 from both arms of the immune system highlights the importance of this cytokine in the early stages of infection, as well as in the secondary adaptive immune response. Furthermore, the dual functions of IL-2 in both protective immunity and immune tolerance allows IL-2 to be a potential therapeutic in seemingly contrasting therapies, as both an immune stimulant and as an immune suppressor, for cancer and autoimmune disease, respectively.

[0167] IL-2Rβγc ligands provided by the present disclosure comprise an IL-2Rβ ligand, an IL-2Rγc ligand, and an IL-2Rβγc ligand linker coupling the IL-2Rβ and IL-2Rγc ligands. An IL-2Rβγc ligand can be an IL-2R agonist, a partial IL-2R agonist, or an IL-2R antagonist. Because the IL-2Rβγc ligands do not bind to IL-2Rα, the IL-2Rβγc ligands do not preferentially activate Tregs, have the potential for lower receptor-mediated clearance, and can exhibit decreased toxicity.

[0168] Tandem IL-2Rβγc ligands provided by the present disclosure comprise two or more IL-2Rβγc ligands coupled together by one or more tandem linkers.

[0169] IL-2Rβγc constructs provided by the present disclosure can comprise at least one IL-2Rβγc ligand coupled to another molecule referred to as a construct partner such as, for example, a polymer, protein, Fc-fragment, immunoglobulin fragment, or antibody.

[0170] IL-2Rβγc constructs provided by the present disclosure can comprise at least one IL-2Rβ ligand and at least one IL-2Rγc coupled to another molecule referred to as a construct partner such as a polymer, protein, Fc-fragment, immunoglobulin fragment, or antibody.

[0171] An IL-2Rβγc ligand can comprise an IL-2Rβ ligand. Examples of suitable IL-2Rβ ligands are disclosed in U.S. Application Publication No. 2020/0040034 A1, which is incorporated by reference in its entirety.

[0172] An IL-2Rβ ligand provided by the present disclosure can bind to the human IL-2Rβ subunit with an IC₅₀, for example, of less than 100 μM, less than 10 μM, less than 1 μM, less than 0.1 μM, or less than 0.01 μM.

[0173] An IL-2Rβ ligand can bind to the human IL-2Rβ subunit with an IC₅₀, for example, from 1 μM to 100 μM, from 10 pM to 10 μM, from 100 pM to 1 μM, from 0.001 μM to 1 μM, or from 0.01 μM to 1 μM.

[0174] An IL-2Rβ ligand provided by the present disclosure can bind to a mammalian IL-2Rβ subunit with an IC₅₀ of less than 100 μM, less than 10 μM, less than 1 μM, less than 0.1 μM, or less than 0.01 μM.

[0175] An IL-2Rβ ligand can bind to a mammalian IL-2Rβ subunit with an IC₅₀, for example, from 1 μM to 100 μM, from 10 μM to 10 μM, from 100 μM to 1 μM, from 0.001 μM to 1 μM, or from 0.01 μM to 1 μM.

[0176] An IL-2Rβ ligand provided by the present disclosure can bind to each of the human IL-2RO subunit and to the human IL-2Rγc subunit with an IC₅₀, for example, of less than 100 μM, less than 10 μM, less than 1 μM, less than 0.1 μM, or less than 0.01 μM.

[0177] An IL-2β ligand can comprise the amino acid sequence of Formula (1) (SEQ ID NO: 805), Formula (1a) (SEQ ID NO: 806), Formula (1b) (SEQ ID NO: 807), Formula (1c) (SEQ ID NO: 808), and/or Formula (1d) (SEQ ID NO: 809):

-X²¹¹-X²¹²-X²¹³-X²¹⁴-C-X²¹⁵-X²¹⁶-X²¹⁷-X²¹⁸-X²¹⁹-X²²⁰-X²²¹-X²²²-C-X²²³-X²²⁴-X²²⁵ (1)

-X²¹²-X²¹³-X²¹⁴-C-X²¹⁵-X²¹⁶-X²¹⁷-X²¹⁸-X²¹⁹-X²²⁰-X²²¹-X²²²-C-X²²³-X²²⁴- (1a)

-X²¹³-X²¹⁴-C-X²¹⁵-X²¹⁶-X²¹⁷-X²¹⁸-X²¹⁹-X²²⁰-X²²¹-X²²²-C-X²²³-X²²⁴- (1b)

-X²⁴-C-X²¹⁵-X²¹⁶-X¹²⁷-X²¹⁸-X²¹⁹-X²²⁰-X²²¹-X²²²-C-X²²³- (1c)

-C-X²¹⁵-X²¹⁶-X²¹⁷-X²¹⁸-X²¹⁹-X²²⁰-X²²¹-X²²²-C- (1d)
[0178] wherein, X²¹¹ can be selected from an amino acid; X²¹² can be selected from an amino acid comprising an aromatic side chain; X²¹³ can be selected from an amino acid comprising a large hydrophobic side chain or an aromatic side chain; X²¹⁴ can be P; X²¹⁵ can be selected from an amino acid comprising an aromatic side chain; X²¹⁶ can be selected from an amino acid comprising a large hydrophobic side chain; X²¹⁷ can be A; X²¹⁸ can be selected from an amino acid comprising a basic side chain or a polar/neutral side chain; X²¹⁹ can be selected from an amino acid comprising a large hydrophobic side chain; X²²⁰ can be G; X²²¹ can be selected from an amino acid comprising an acidic side chain or a polar/neutral side chain; X²²² can be L; X²²³ can be D; X²²⁴ can be selected from an amino acid comprising a large hydrophobic side chain; and X²²⁵ can be selected from an amino acid comprising an acidic side chain.

[0179] In IL-2Rβ ligands of Formula (1), (1a), (1b), (1c), and/or (1d), X²¹¹ can be selected from an amino acid; X²¹² can be selected from F, H, W, and Y; X²¹³ can be selected from F, H, I, L, M, V, W, and Y; X²¹⁴ can be P; X²¹⁵ can be selected from F, H, W, and Y; X²¹⁶ can be selected from F, I, L, M, V, W, and Y; X²¹⁷ can be A; X²¹⁸ can be selected from K, R, H, N, Q, S, T, and Y; X²¹⁹ can be selected from F, I, L, M, V, W, and Y; X²²⁰ can be G; X²²¹ can be selected from D, E, H, N, Q, S, T, and Y; X²²² can be L; X²²³ can be D; X²²⁴ can be selected from F, I, L, M, V, W, and Y; and X²²⁵ can be selected from D and E.

[0180] In IL-2Rβ ligands of Formula (1), X²¹¹ can be selected from an amino acid.

[0181] In IL-2Rβ ligands of Formula (1), X²¹¹ can be selected from H, K, and R.

[0182] In IL-2Rβ ligands of Formula (1), X²¹¹ can be selected from H and R.

[0183] In IL-2Rβ ligands of Formula (1)-(1a), X²¹² can be selected from F, H, W, and Y.

[0184] In IL-2Rβ ligands of Formula (1)-(1a), X²¹² can be W.

[0185] In IL-2Rβ ligands of Formula (1)-(1b), X²¹³ can be selected from F, H, I, L, M, V, W, and Y.

[0186] In IL-2Rβ ligands of Formula (1)-(1b), X²¹³ can be L.

[0187] In IL-2Rβ ligands of Formula (1)-(1b), X²¹³ can be Y.

[0188] In IL-2Rβ ligands of Formula (1)-(1c), X²¹⁴ can be P.

[0189] In IL-2Rβ ligands of Formula (1)-(1d), X²¹⁵ can be selected from F, H, W, and Y.

[0190] In IL-2Rβ ligands of Formula (1)-(1d), X²¹⁵ can be W.

[0191] In IL-2Rβ ligands of Formula (1)-(1d), X²¹⁶ can be selected from F, I, L, M, V, W, and Y.

[0192] In IL-2Rβ ligands of Formula (1)-(1d), X²¹⁶ can be M.

[0193] In IL-2Rβ ligands of Formula (1)-(1d), X²¹¹ can be A.

[0194] In IL-2Rβ ligands of Formula (1)-(1d), X²¹⁸ can be selected from K, R, H, N, Q, S, T, and Y.

[0195] In IL-2Rβ ligands of Formula (1)-(1d), X²¹⁸ can be selected from K and R.

[0196] In IL-2Rβ ligands of Formula (1)-(1d), X²¹⁸ can be Q.

[0197] In IL-2Rβ ligands of Formula (1)-(1d), X²¹⁹ can be selected from F, I, L, M, V, W, and Y.

[0198] In IL-2Rβ ligands of Formula (1)-(1d), X²¹⁹ can be L.

[0199] In IL-2Rβ ligands of Formula (1)-(1d), X²²⁰ can be G.

[0200] In IL-2Rβ ligands of Formula (1)-(1d), X²²¹ can be selected from D, E, H, N, Q, S, T, and Y.

[0201] In IL-2Rβ ligands of Formula (1)-(1d), X²²¹ can be E.

[0202] In IL-2Rβ ligands of Formula (1)-(1d), X²²² can be L.

[0203] In IL-2Rβ ligands of Formula (1)-(1c), X²²³ can be D.

[0204] In IL-2Rβ ligands of Formula (1)-(1b), X²²⁴ can be selected from F, I, L, M, V, W, and Y.

[0205] In IL-2Rβ ligands of Formula (1)-(1b), X²²⁴ can be L.

[0206] In IL-2Rβ ligands of Formula (1)-(1a), X²²⁵ can be selected from D and E.

[0207] In IL-2Rβ ligands of Formula (1), (1a), (1b), (1c), and/or (1d), X²¹¹ can be selected from H, K, and R; X²¹² can be W; X²¹³ can be Y; X²¹⁴ can be P; X²¹⁵ can be W; X²¹⁶ can be M; X²¹⁷ can be A; X²¹⁸ can be selected N and Q; X²¹⁹ can be selected from L and V; X²²⁰ can be G; X²²¹ can be selected from E, D, and Q; X²²² can be L; X²²³ can be D; X²²⁴ can be selected from L and M; and X²²⁵ can be selected from D and E.

[0208] In IL-2Rβ ligands of Formula (1), (1a), (1b), (1c), and/or (1d), X²¹¹ can be selected from A, D, E, G, H, L, M, N, Q, R, S, T, and V; X²¹² can be selected from C, F, W, and Y; X²¹³ can be selected from F, H, K, L, N, Q, R, S, W, and Y; X²¹⁴ can be P; X²¹⁵ can be selected from W and Y; X²¹⁶ can be selected from F, I, K, L, M, R, S, T, and V; X²¹⁷ can be A; X²¹⁸ can be selected from D, E, G, H, K, L, N, Q, R, S, and Y; X²¹⁹ can be selected from L, P, and V; X²²⁰ can be selected from G, H, and W; X²²¹ can be selected from D, E, and Q; X²²² can be selected from L and M; X²²³ can be D; X²²⁴ can be selected from L, M, Q, and V; and X²²⁵ can be selected from A, D, E, F, G, H, L, N, Q, T, and V.

[0209] In IL-2Rβ ligands of Formula (1), (1a), (1b), (1c), and/or (1d), X²¹¹ can be selected from H an R; X²¹² can be selected from F and W; X²¹³ can be selected from F, L, W, and Y; X²¹⁴ can be P; X²¹⁵ can be selected from W and Y; X²¹⁶ can be selected from F, I, L, M, and V; X²¹⁷ can be A; X²¹⁸ can be selected D, E, H, K, N, Q, and R; X²¹⁹ can be selected from L and V; X²²⁰ can be G; X²²¹ can be selected from D, E, and Q; X²²² can be selected from L and M; X²²³ can be D; X²²⁴ can be selected L, M, and V; and X²²⁵ can be selected from D and E.

[0210] In IL-2Rβ ligands of Formula (1), (1a), (1b), (1c), and/or (1d), X²¹¹ can be selected from H and R; X²² can be W; X²¹³ can be Y; X²¹⁴ can be P; X²¹⁵ can be W; X²¹⁶ can be M; X²¹⁷ can be A; X²¹⁸ can be Q; X²¹⁹ can be L; X²²⁰ can be G; X²²1 can be Q; X²²² can be L; X²²³ can be D; X²²⁴ can be L; and X²²⁵ can be selected from D and E.

[0211] In IL-2Rβ ligands of Formula (1), (1a), (1b), (1c), and/or (1d), X²¹¹ can be selected from H and R; X²² can be W; X²¹³ can be L; X²¹⁴ can be P; X²¹⁵ can be W; X²¹⁶ can be M; X²¹⁷ can be A; X²¹⁸ can be Q; X²¹⁹ can be L; X²²⁰ can be G; X²²1 can be Q; X²²² can be L; X²²³ can be D; X²²⁴ can be L; and X²²⁵ can be selected from D and E.

[0212] In IL-2Rβ ligands of Formula (1), (1a), (1b), (1c), and/or (1d), X²¹¹ can be selected from H and R; X²² can be W; X²¹³ can be Y; X²¹⁴ can be P; X²¹⁵ can be W; X²¹⁶ can be M; X²¹⁷ can be A; X²¹⁸ can be selected from K and R; X²¹⁹ can be L; X²²⁰ can be G; X²²¹ can be Q; X²²² can be L; X²²³ can be D; X²²⁴ can be L; and X²²⁵ can be selected from D and E.

[0213] An IL-2Rβ ligand can comprise an amino acid sequence selected from any one of SEQ ID NOS: 810-903.

SEQ ID NO: 810
Q P C W L A Q V G D L C D L L W P G P L
SEQ ID NO: 811
W L P C W I A R L G D L C D L E
SEQ ID NO: 812
W Y P C W M A L L G E L C D Q E
SEQ ID NO: 813
W Y P C Y R A R L G E L C D L D
SEQ ID NO: 814
W Q R E W R W F P C W M A K L G D M C D L D
SEQ ID NO: 815
Q D E A V E W F P C W M A R L G E L C D L E
SEQ ID NO: 816
Y Y P C W M A R L G E L C D L D
SEQ ID NO: 817
S V V V N N W L P C W M A Q L G E L C D L D
SEQ ID NO: 818
W Y P C W L A Q L G D L C D L D
SEQ ID NO: 819
V M S P T R W L P C W I A K L G E L C D L E
SEQ ID NO: 820
W F P C W M A Q L G Q L C D L E
SEQ ID NO: 821
W R P C W R A Y L G E L C D L E A M P R A T
SEQ ID NO: 822
I R S C S P C W S A D V G E L C D L E C E W
SEQ ID NO: 823
S G H W Y P C W M A R L G E L C D M E E R A
SEQ ID NO: 824
W Y P C W M A Q L G E L C D L Q T M G Y S H
SEQ ID NO: 825
A G D W L P C W M A E L G E L C D L E G P T
SEQ ID NO: 826
W L P C W I A S L G E L C D L D T G K R Q G
SEQ ID NO: 827
W L P C W M A H L G Q L C D L D L P G K S M
SEQ ID NO: 828
E G V F F P C W I A R L G E L C D L D H G L
SEQ ID NO: 829
T G R W K P C W M A G L H E L C D L E G F R
SEQ ID NO: 830
R K H F Y P C W M A Q L G E L C D L E G M P
SEQ ID NO: 831
D I G Y Y P C W M A Q V G D L C D L D D E K
SEQ ID NO: 832
D S D W W P C W M A Q L G E L C D L E D A R
SEQ ID NO: 833
G E R W K P C W I A Q L G E L C D L D F N W
SEQ ID NO: 834
W W P C W M A Q L G E M C D L E Y P Y V P G
SEQ ID NO: 835
Q T K L E G W Y P C W M A Q L G E L C D L D
SEQ ID NO: 836
W G R K E Q W L P C W K A Q L G E L C D L E
SEQ ID NO: 837
V P R A N A W H P C W M A Q L G E L C D L E
SEQ ID NO: 838
G R Q Q K G W Y P C W L A Q L G E L C D M E
SEQ ID NO: 839
W L N R H L F N P C W M A R L G E L C D L E
SEQ ID NO: 840
A Q V R R E W Y P C W M A Q L G E L C D L T
SEQ ID NO: 841
E T E Q M S W Y P C W V A Q L W E L C D L D
SEQ ID NO: 842
W L P C W L A K L G E L C D L E W L P C W
SEQ ID NO: 843
E R R P D T W F P C W R A L V G E L C D L E
SEQ ID NO: 844
W G R N R S W Y P C W M A Q L G E L C D L E
SEQ ID NO: 845
Q D R R S P W Y P C W M A K L G E L C D L A
SEQ ID NO: 846
T R R W Y P C Y L A K L G E L C D L F E G G T R
SEQ ID NO: 847
S E Q W W P C W I A R L G E L C D L D R E L S E
SEQ ID NO: 848
W Y P C W V A Q L G E I C D L E M T G P D S W Y P
SEQ ID NO: 849
Q D G W L P C W M A Q L G E L C D L E Y K R
SEQ ID NO: 850
N R R W Y P C W M A Q L G E L C D L D S R P
SEQ ID NO: 851
F Y P C W M A H L G E L C D L D G D T D S M
SEQ ID NO: 852
K S N F F P C W I A Q L G Q L C D L E P E T
SEQ ID NO: 853
F Y P C W M A N L G E L C D L D F L R E L N
SEQ ID NO: 854
H A S W L P C W L A Q L G E L C D L E P N P
SEQ ID NO: 855
N G A W Y P C W M A Q V G E L C D L E E R W
SEQ ID NO: 856
W R R W Y P C W V A Q V G E L C D L E I E A
SEQ ID NO: 857
R Q A W Y P C W M A Q L G E L C D L E A E L
SEQ ID NO: 858
R Q R W Y P C W M A R L G E L C D L D E P T
SEQ ID NO: 859
N N S R E G W F P C W L A K L G D L C D L D
SEQ ID NO: 860
Y Y P C W M A Q L G E L C D L E
SEQ ID NO: 861
W Y P C W L A Q L G E L C D L D
SEQ ID NO: 862
S W H A E T W Y P C W L A Q V G E L C D L D
SEQ ID NO: 863
K M H K A V W L P C W M A Q V G E L C D L E
SEQ ID NO: 864
D V L G D R W Y P C W I A K L G E L C D L D
SEQ ID NO: 865
W Y P C W M A Q L G E L C D L D
SEQ ID NO: 866
K L Q S W R W Y P C W M A Q L G E L C D L D
SEQ ID NO: 867
N E P E G G F Y P C W L A Q L G E L C D L H
SEQ ID NO: 868
W Y P C W M A R L G E L C D L E
SEQ ID NO: 869
F Y P C W T A L L G E L C D L E P G P P A M
SEQ ID NO: 870
W G T T W R W Y P C W M A Q L G E L C D L E
SEQ ID NO: 871
A K G W D T W K P C W L A N L G E L C D L E
SEQ ID NO: 872
R D E S A G Y Y P C W I A Q L G E L C D L E
SEQ ID NO: 873
W Y P C W I A K L G E L C D L E
SEQ ID NO: 874
W Y P C W I A Q L G E L C D L D
SEQ ID NO: 875
W Y P C W L A K L G E L C D L D
SEQ ID NO: 876
Q G P V R L W Y P C W M A Q L G E L C D L D
SEQ ID NO: 877
W Y P C W M A Q P G E L C D V D
SEQ ID NO: 878
W H P C W I A Q L G E L C D L E
SEQ ID NO: 879
W Y P C W I A Q L G E L C D L E
SEQ ID NO: 880
V R P M G V W Y P C W I A Q L G E L C D L V
SEQ ID NO: 881
V P R W Y P C W 1 A Q L G E L C D L D S D D
SEQ ID NO: 882
Y R G W L P C W R A K L G D L C D L G Q P M
SEQ ID NO: 883
G E A W Y P C W L A R L G E L C D M D P R V
SEQ ID NO: 884
W Y P C W M A Q L G E L C D L D E S T R L T
SEQ ID NO: 885
I G S W W P C W M A Q L G E L C D L E P E L
SEQ ID NO: 886
G T T W Y P C W L A Q L G E L C D L D V L E
SEQ ID NO: 887
W W P C W M A Q L G D L C D L E E T S G G T
SEQ ID NO: 888
W Y P C W M A Q L G E L C D L G P T E S N L
SEQ ID NO: 889
W Y P C W M A N L G E L C D L E Y P S W A Q
SEQ ID NO: 890
R G M C Y P C W F A R L G E L C D L E C D Q
SEQ ID NO: 891
W Y P C W M A Q L G E L C D L D A G A R H L
SEQ ID NO: 892
K S G W Y P C W M A K L G E L C D L E A Q P
SEQ ID NO: 893
G P R F Y P C W I A Q L G E L C D L E D M G
SEQ ID NO: 894
R V T W Y P C W M A Q L G E L C D L E E S V
SEQ ID NO: 895
W L P C W M A Q L G D L C D L E Q Y V P L P
SEQ ID NO: 896
Y L P C W M A H L G E L C D L D S P L K A R
SEQ ID NO: 897
W Y P C W M A Q L G E L C D L D D H W P A M
SEQ ID NO: 898
W Y P C W R A Q L G E L C D L D P P I A V E
SEQ ID NO: 899
W Y P C W M A N L G E L C D L E A E R S P V
SEQ ID NO: 900
R D Q Y Y P C W M A Q L G E L C D L D E V F
SEQ ID NO: 901
W Y P C W M A Q L G D L C D L E K P V T E R
SEQ ID NO: 902
W Y P C W I A R L G E L C D L E T S G G F P
SEQ ID NO: 903
S G H C Y P C W L A G L G E L C D L N C G

[0214] An IL-2Rβ ligand can comprise an amino acid sequence selected from any one of SEQ ID NOS: 805-903, wherein the amino acid sequence can be terminated with one or more amino acids on the N-terminus, on the C-terminus, or on both the N- and C-termini. For example, an amino acid sequence can include terminal glycines and/or serines. For example, an IL-2Rβ ligand can comprise a -G-G- moiety (SEQ ID NO: 9399) on the N-terminus, on the C-terminus, or on both the N- and C-termini.

[0215] An IL-2Rβ ligand can comprise an amino acid sequence selected from any one of SEQ ID NOS: 805-903, wherein each amino acid independently comprises one or more of the following conservative substitutions: amino acids having a small hydrophobic side chain comprising alanine (A), glycine (G), proline (P), serine (S), or threonine (T); amino acids having a hydroxyl-containing side chain comprising serine (S), threonine (T), or tyrosine (Y); amino acids having an acidic side chain comprising aspartate (D) or glutamate (E); amino acids having a polar-neutral side chain comprising histidine (H), asparagine (N), glutamine (Q), serine (S), threonine (T), or tyrosine (Y); amino acids having a basic side chain comprising arginine (R), lysine (K), or histidine (H); and amino acids having a large hydrophobic side chain comprising isoleucine (I), leucine (L), methionine (M), valine (V), phenylalanine (F), tyrosine (Y), or tryptophan (W); and amino acids having an aromatic side chain comprising phenylalanine (F), histidine (H), tryptophan (W), or tyrosine (Y).

[0216] IL-2Rβ ligands of SEQ ID NOS: 805-903 can bind to the human IL-2Rβ subunit with an IC₅₀ of less than 100 μM.

[0217] An IL-2Rβ ligand can comprise an amino acid sequence similarity greater than 60%, greater than 70%, greater than 75%, greater than 80%, greater than 85%, greater than 90%, or greater than 95% to the amino acid sequence of any one of SEQ ID NOS: 805-903.

[0218] An IL-2Rβ ligand provided by the present disclosure can comprise a truncated amino acid sequence of any one of SEQ ID NOS: 805-903.

[0219] An IL-2Rβ ligand provided by the present disclosure can comprise an amino acid sequence selected from any one of SEQ ID NOS: 805-903, or a truncated amino acid sequence of any one of SEQ ID NOS: 805-903, wherein the amino acid sequence can independently comprise from 1 to 4 glycines (G) (SEQ ID NO: 9429) on the N-terminus, on the C-terminus, or on both the N- and C-termini.

[0220] An IL-2Rβ ligand provided by the present disclosure can comprise an amino acid sequence selected from any one of SEQ ID NOS: 805-903, or a truncated amino acid sequence of any one of SEQ ID NOS: 805-903, wherein the amino acid sequence comprises one or more amino acid substitutions such as from 1 to 5 amino acid substitutions. The amino acid substitutions can comprise conservative amino acid substitutions.

[0221] An IL-2Rβ ligand can comprise an amino acid sequence having an amino acid sequence similarity greater than 60%, greater than 70%, greater than 75%, greater than 80%, greater than 85%, greater than 90%, or greater than 95% to the amino acid sequence of any one of SEQ ID NOS: 805-903 or to a truncated amino acid sequence of any one of SEQ ID NOS: 805-903.

[0222] An IL-2Rβ ligand of any one of SEQ ID NOS: 805-903 can bind to the hIL-2Rβ subunit with an IC₅₀ of less than 10 μM as determined using phage ELISA competition assays.

[0223] An IL-2Rβ ligand of any one of SEQ ID NOS: 805-903, a truncated IL-2Rβ ligand of any one of SEQ ID NOS: 805-903, or a substituted IL-2Rβ ligand of any one of SEQ ID NOS: 805-903 can bind to the hIL-2Rβ subunit with an IC₅₀ of less than 100 μM or less than 10 μM as determined using phage ELISA competition assays.

[0224] An IL-2Rβ ligand provided by the present disclosure can comprise the amino acid sequence of Formula (2) (SEQ ID NO: 2575), an amino acid sequence of Formula (2a) (SEQ ID NO: 2576), an amino acid sequence of Formula (2b) (SEQ ID NO: 2577), an amino acid sequence of Formula (2c) (SEQ ID NO: 2578), or an amino acid sequence of Formula (2d) (SEQ ID NO: 2579):

-X¹-X²-X³-C-X⁴-X⁵-X⁶-X⁷-X⁸-X⁹-X¹⁰-X¹¹-C-X²-X¹³-X¹⁴- (2)

-X²-X³-C-X⁴-X⁵-X⁶-X⁷-X⁸-X⁹-X¹⁰-X¹¹-C-X²-X¹³- (2a)

-X³-C-X⁴-X⁵-X⁶-X⁷-X⁸-X⁹-X¹⁰-X¹¹-C-X²- (2b)

-C-X⁴-X⁵-X⁶-X⁷-X⁸-X⁹-X¹⁰-X¹¹-C- (2c)

-X⁴-X⁵-X⁶-X⁷-X⁸-X⁹-X¹⁰-X¹¹- (2d)

[0225] wherein,
[0226] X¹ can be selected from E, F, G, I, L, R, S, W, and Y;
[0227] X² can be selected from F, H, K, L, N, Q, S, T, V, W, and Y;
[0228] X³ can be selected from E, G, L, P, and S;
[0229] X⁴ can be selected from E, F, G, H, Q, R, S, W, and Y;
[0230] X⁵ can be selected from E, I, K, L, M, N, R, S, T, and V;
[0231] X⁶ can be selected from A, D, G, and Y;
[0232] X⁷ can be selected from A, C, D, E, G, H, K, L, N, Q, R, S, and T;
[0233] X⁸ can be selected from D, F, L, M, P, R, and V;
[0234] X⁹ can be selected from G, R W, and Y;
[0235] X¹⁰ can be selected from A, D, E, Q, W, and Y;
[0236] X¹¹ can be selected from I, L, Q, V, and Y;
[0237] X¹² can be selected from D, E, G, H, V, and Y;
[0238] X¹³ can be selected from D, F, H, I, K, L, M, and V; and
[0239] X¹⁴ can be selected from A, D, E, G, H, K, L, N, Q, V, and W.

[0240] In an IL-2Rβ ligand of Formula (2)-(2d), X¹ can be selected from S, W, and Y.

[0241] In an IL-2Rβ ligand of Formula (2)-(2d), X¹ can be W.

[0242] In an IL-2Rβ ligand of Formula (2)-(2d), X² can be selected from K, L, W, and Y.

[0243] In an IL-2Rβ ligand of Formula (2)-(2d), X³ can be P.

[0244] In an IL-2Rβ ligand of Formula (2)-(2d), X⁴ can be W.

[0245] In an IL-2Rβ ligand of Formula (2)-(2d), X⁵ can be selected from I, L, and M

[0246] In an IL-2Rβ ligand of Formula (2)-(2d), X⁶ can be A.

[0247] In an IL-2Rβ ligand of Formula (2)-(2d), X⁷ can be Q.

[0248] In an IL-2Rβ ligand of Formula (2)-(2d), X⁸ can be L

[0249] In an IL-2Rβ ligand of Formula (2)-(2d), X⁹ can be G

[0250] In an IL-2Rβ ligand of Formula (2)-(2d), X¹⁰ can be selected from D and E.

[0251] In an IL-2Rβ ligand of Formula (2)-(2d), X¹¹ can be L.

[0252] In an IL-2Rβ ligand of Formula (2)-(2d), X¹² can be selected from D and E.

[0253] In an IL-2Rβ ligand of Formula (2)-(2d), X¹³ can be L.

[0254] In an IL-2Rβ ligand of Formula (2)-(2d), X¹⁴ can be selected from D and E.

[0255] In an IL-2Rβ ligand of Formula (2)-(2d), the IL-2Rβ ligand can be defined by any combination of X¹ to X¹⁴ as defined in the immediately preceding sixteen (16) paragraphs.

[0256] In an IL-2Rβ ligand of Formula (2)-(2d),
[0257] X¹ can be selected from S, W, and Y;
[0258] X² can be selected from K, L, W, and Y;
[0259] X³ can be P;
[0260] X⁴ can be W;
[0261] X⁵ can be selected from I, L, and M;
[0262] X⁶ can be A;
[0263] X⁷ can be Q;
[0264] X⁸ can be L;
[0265] X⁹ can be G;
[0266] X¹⁰ can be selected from D and E;
[0267] X¹¹ can be L;
[0268] X¹² can be selected from D and E;
[0269] X¹³ can be L; and
[0270] X¹⁴ can be selected from D and E.

[0271] In an IL-2Rβ ligand of Formula (2)-(2d),
[0272] X¹ can be W;
[0273] X² can be selected from K, L, W, and Y;
[0274] X³ can be P;
[0275] X⁴ can be W;
[0276] X⁵ can be selected from I, L, and M;
[0277] X⁶ can be A;
[0278] X⁷ can be Q;
[0279] X⁸ can be L;
[0280] X⁹ can be G;
[0281] X¹⁰ can be selected from D and E;
[0282] X¹¹ can be L;
[0283] X¹² can be selected from D and E;
[0284] X¹³ can be L; and
[0285] X¹⁴ can be selected from D and E.

[0286] An IL-2Rβ ligand can comprise the amino acid sequence of any one of SEQ ID NOS: 2580-2655.

SEQ ID NO: 2580
V R A W Y P C W I A R L G E L C D L E V D
SEQ ID NO: 2581
W F P C W M A Q L G E V C D L D
SEQ ID NO: 2582
W Y P C H M A K L R E L C D L D
SEQ ID NO: 2583
S L P C W M A Q L G D L C E L H
SEQ ID NO: 2584
S N P C W M A Q L W E L C D L E
SEQ ID NO: 2585
Y K P C W I A Q L G E L C E L E
SEQ ID NO: 2586
W Q P C W M A Q L G E L C D L E
SEQ ID NO: 2587
W K P C W L A Q L G D L C E M E
SEQ ID NO: 2588
W L P C W M A K L G D L C E L E
SEQ ID NO: 2589
W L P C W M A Q L G E L C V M E
SEQ ID NO: 2590
L H P C W M A Q L G E L C D L E
SEQ ID NO: 2591
S L P C W M A Q L G E L C D L V
SEQ ID NO: 2592
W K P C W M A G L G E L C E L D
SEQ ID NO: 2593
W W P C S S A E L G E I C D F D
SEQ ID NO: 2594
W Q P C W R A K L G E L C D L E
SEQ ID NO: 2595
W S P C W I A T L G E L C D L D
SEQ ID NO: 2596
W N P C W I A Q L G D L C D M V
SEQ ID NO: 2597
W L P C W L A H L G D I C D L Q
SEQ ID NO: 2598
W L S P P S Y L P C W M A Q L G E L C D L V
SEQ ID NO: 2599
W D V H A I R N P C W L A K L G D L C D L D
SEQ ID NO: 2600
G A G V L H R W P C W M A K L G D L C D L D
SEQ ID NO: 2601
D T G R D G W K P C W M A L L G E L C E L E
SEQ ID NO: 2602
E Q G M L G Y F P C W K A L L G D V C D L D
SEQ ID NO: 2603
W R V T A S L Q P C W M A Q L G E L C D L N
SEQ ID NO: 2604
G Q V V E T S L P C W E A Q L G E L C V L D
SEQ ID NO: 2605
T V G Q F E W Y P C S T A Q L G E L C D L D
SEQ ID NO: 2606
A L V G G T F Y P C Y V A H L G E L C D I E
SEQ ID NO: 2607
I D R A D G W K P C W I A Q V G E L C V L E
SEQ ID NO: 2608
Y R R E R V E F P C W L A Q L G E L C D K E
SEQ ID NO: 2609
A V S H G N W L P C Y I A Q L G E L C D L D
SEQ ID NO: 2610
I P K G E S W F P C W M A A M G E L C D L E
SEQ ID NO: 2611
W Y P C W I A Q L G E V C D L E K Q T G S V
SEQ ID NO: 2612
W Y P C W M A H L G D V C D L E S F G Q T E
SEQ ID NO: 2613
Y K P C Q M A Q L G E L C D L D V D N K A E
SEQ ID NO: 2614
F K P C W I A N L G E L C D M D D E R S S E
SEQ ID NO: 2615
W K P C W M A R L G E L C D I E D T K V N A
SEQ ID NO: 2616
S L P C W I A R L G E L C D L D G Y D G E E
SEQ ID NO: 2617
F Y P C W K A R L G E L C E L E E L R G Y Y
SEQ ID NO: 2618
W K P C W I A D L G E L C D L A P A W H E Y
SEQ ID NO: 2619
R L P C W R A Q L G D L C E L D W G L D M G
SEQ ID NO: 2620
S K P C W M A Q L G E L C D L D V W N L Q M
SEQ ID NO: 2621
G Y P C W L A Q L G D Y C D L D A G A P S W
SEQ ID NO: 2622
S W P C W M A Q L G D L C D L D G S A G A S
SEQ ID NO: 2623
W K P C W L A Q L G E L C D L E R P S T T S
SEQ ID NO: 2624
W Y S C G K A Q L G E L C D L D V E S Q P G
SEQ ID NO: 2625
Y V P C Y M A R L G E L C E L E A N R P G Q
SEQ ID NO: 2626
S K P C W L A Q L G D L C D F D W T A A D H
SEQ ID NO: 2627
W F P C W M A Q L G D L C E L E P D S V P A
SEQ ID NO: 2628
W T P C W I A H L G D L C D L E P Q D D T D
SEQ ID NO: 2629
W K P C F 1 A S L G E L C D L D Q G S V E V
SEQ ID NO: 2630
W K P C W M A A L G E L C D L E R S V G K V
SEQ ID NO: 2631
W K P C W R A Q L G E L C D L E L G P S E R
SEQ ID NO: 2632
F F P C W M G Q L G D L C D L E V R S M Q K
SEQ ID NO: 2633
Y W P C S M A S L G E L C D L E W Q G R L P
SEQ ID NO: 2634
W Y P C Y M A S L G E L C D L Q S S I S P R
SEQ ID NO: 2635
W Y P C W M A Q L G E L C D H E W P S Y G A
SEQ ID NO: 2636
M G S W L P C W M A Q L G D L C D V E G G M
SEQ ID NO: 2637
Q K G F L P C W R A Q L G Q L C D M E S Q Y
SEQ ID NO: 2638
G S G W Q P C W M A D L G E L C D L D N E K
SEQ ID NO: 2639
W R R W Y P C W M A Q L G E L C D L D Q W T
SEQ ID NO: 2640
R R S W Y P C R I A Q L G E L C D L D P R V
SEQ ID NO: 2641
A Y R I Y P C W K A Q L G E L C D L D N A D
SEQ ID NO: 2642
Q R N S F P C W L A Q L G D L C D L G D W A
SEQ ID NO: 2643
Q P A W L P C W L A Q L G E L C D L G T G A
SEQ ID NO: 2644
S R F W Q P C W M A Q L G E L C H L D P Q M
SEQ ID NO: 2645
Y L N F N P C W T A Q L G E L C D L A S G E
SEQ ID NO: 2646
S T G W Y P C W I A E F G E L C D L V K P H
SEQ ID NO: 2647
A H W S Q P C W T A Q L G E L C D L D M G D
SEQ ID NO: 2648
H P V R Y P C W V A Q L G E L C D L E N G N
SEQ ID NO: 2649
Q T G S Y P C W I A H L G E L C D L E G S A
SEQ ID NO: 2650
T G W W Y P C W M A Q L G E L C D L Q Q T
SEQ ID NO: 2651
D L W Q P C W M A R L G E L C D L K G
SEQ ID NO: 2652
M G T G W Q N Y C R Y A Q L G E L C L L
SEQ ID NO: 2653
W Y P C G V A Q P G D L C D L E
SEQ ID NO: 2654
M L G E W L C E M D Q L G Y L C Y L D H G D
SEQ ID NO: 2655
W D G W E C G M D H D G W V C E F W G E

[0287] An IL-2Rβ ligand provided by the present disclosure can comprise a truncated amino acid sequence of any one of SEQ ID NOS: 2575-2655.

[0288] An IL-2Rβ ligand provided by the present disclosure can comprise an amino acid sequence selected from any one of SEQ ID NOS: 2575-2655, or a truncated amino acid sequence of any one of SEQ ID NOS: 2575-2655, wherein the amino acid sequence can independently comprise from 1 to 4 glycines (SEQ ID NO: 9429) on the N-terminus, on the C-terminus, or on both the N- and C-termini.

[0289] An IL-2Rβ ligand provided by the present disclosure can comprise an amino acid sequence selected from any one of SEQ ID NOS: 2575-2655, or a truncated amino acid sequence of any one of SEQ ID NOS: 2575-2655, wherein the amino acid sequence comprises one or more amino acid substitutions such as from 1 to 5 amino acid substitutions. The amino acid substitutions can comprise conservative amino acid substitutions.

[0290] An IL-2Rβ ligand can comprise an amino acid sequence having an amino acid sequence similarity greater than 60%, greater than 70%, greater than 75%, greater than 80%, greater than 85%, greater than 90%, or greater than 95% to the amino acid sequence of any one of SEQ ID NOS: 2575-2655 or to a truncated amino acid sequence of any one of SEQ ID NOS: 2575-2655.

[0291] An IL-2Rβ ligand of any one of SEQ ID NOS: 2575-655, a truncated IL-2Rβ ligand of any one of SEQ ID NOS: 2575-2655, or a substituted IL-2Rβ ligand of any one of SEQ ID NOS: 2575-2655 can bind to the hIL-2Rβ subunit with an IC₅₀ of less than 100 μM or less than 10 μM and to the cyIL-2Rβ subunit with an IC₅₀ of less than 100 μM or less than 10 μM as determined using phage ELISA competition assays.

[0292] An IL-2Rβ ligand of any one of SEQ ID NOS: 2580-2655 bound to the hIL-2Rβ subunit with an IC₅₀ of less than 100 μM as determined using phage ELISA competition assays.

[0293] An IL-2Rβ ligand provided by the present disclosure can comprise the amino acid sequence of Formula (3) (SEQ ID NO: 2661), an amino acid sequence of Formula (3a) (SEQ ID NO: 2662), an amino acid sequence of Formula (3b) (SEQ ID NO: 2663), an amino acid sequence of Formula (3c) (SEQ ID NO: 2664), an amino acid sequence of Formula (3d) (SEQ ID NO: 2665), an amino acid sequence of Formula (3e) (SEQ ID NO: 2666):

-X¹-X²-X³-X⁴-C-X⁵-X⁶-X⁷-X⁸-X⁹-X¹⁰-X¹-X²-C-X¹³-X¹⁴-X⁵-X⁶-X⁷- (3)

-X²-X³-X⁴-C-X⁵-X⁶-X⁷-X⁸-X⁹-X¹⁰-X¹¹-X¹²-C-X¹³-X¹⁴-X⁵- (3a)

-X³-X⁴-C-X⁵-X⁶-X⁷-X⁸-X⁹-X¹⁰-X¹-X¹²-C-X¹³-X¹⁴- (3b)

-X⁴-C-X⁵-X⁶-X⁷-X⁸-X⁹-X¹⁰-X¹¹-X¹²-C-X¹³- (3c)

-C-X⁵-X⁶-X⁷-X⁸-X⁹-X¹⁰-X¹¹-X¹²-C- (3d)

-X⁵-X⁶-X⁷-X⁸-X⁹-X¹⁰-X¹¹-X¹²- (3e)

[0294] wherein,
[0295] X¹ can be selected from A, D, E, F, G, H, I, K, L, M, N, P, Q, R, S, T, V, W, and Y;
[0296] X² can be selected from C, D, F, G, I, L, M, R, S, V, W, and Y;
[0297] X³ can be selected from A, D, F, H, K, L, N, P, Q, R, S, T, V, W, and Y;
[0298] X⁴ can be selected from A, D, F, L, N, P, Q, S, T, and W;
[0299] X⁵ can be selected from D, E, F, G, L, M, Q, R, S, W, and Y;
[0300] X⁶ can be selected from A, F, I, K, L, M, N, Q, R, S, V, W, and Y;
[0301] X⁷ can be selected from A, D, E, I, S, T, V, and W;
[0302] X⁸ can be selected from A, E, F, G, H, K, L, N, P, Q, R, S, V, W, and Y;
[0303] X⁹ can be selected from A, E, I, L, M, P, Q V, and W;
[0304] X¹⁰ can be selected from F, G, and V;
[0305] X¹¹ can be selected from D, E, N, P, Q, S, V, W, and Y;
[0306] X¹² can be selected from D, F, H, I, L, M, Q, S, T, V, and W;
[0307] X¹³ can be selected from A, D, E, L, N, Q, S, T, and V;
[0308] X¹⁴ can be selected from A, E, F, I, K, L, M, Q, R S, T V, and W;
[0309] X¹⁵ can be selected from A, D, E, F, G, I, K, L, N, P, Q, R, T, V, W, and Y;
[0310] X¹⁶ can be selected from A, C, D, E, F, G, H, I, L, M, N, P, Q, R, S, T, V, W, and Y; and
[0311] X¹⁷ can be selected from A, D, E, F, G, H, I, K, L, M N, P, Q, R, S, T, V, W, and Y.

[0312] In an IL-2Rβ ligand of Formula (3)-(3e), X¹ can be selected from A, D, E, G, R, S, T, V, and W.

[0313] In an IL-2Rβ ligand of Formula (3)-(3e), X¹ can be selected from G, R, and W.

[0314] In an IL-2Rβ ligand of Formula (3)-(3e), X² can be selected from F, L, S, V, W, and Y

[0315] In an IL-2Rβ ligand of Formula (3)-(3e), X² can be selected from F and W.

[0316] In an IL-2Rβ ligand of Formula (3)-(3e), X³ can be selected from F, H, K, L, N, Q, W, and Y.

[0317] In an IL-2Rβ ligand of Formula (3)-(3e), X³ can be selected from F, H, L, W, and Y.

[0318] In an IL-2Rβ ligand of Formula (3)-(3e), X⁴ can be selected from D and P.

[0319] In an IL-2Rβ ligand of Formula (3)-(3e), X⁵ can be selected from F, L, S, W, and Y.

[0320] In an IL-2Rβ ligand of Formula (3)-(3e), X⁵ can be selected from F, W, and Y.

[0321] In an IL-2Rβ ligand of Formula (3)-(3e), X⁶ can be selected from F, I, K, L, M, R, and V.

[0322] In an IL-2Rβ ligand of Formula (3)-(3e), X⁶ can be selected from I, L, and M.

[0323] In an IL-2Rβ ligand of Formula (3)-(3e), X⁷ can be A.

[0324] In an IL-2Rβ ligand of Formula (3)-(3e), X⁸ can be selected from H, K, L, Q, R, and S.

[0325] In an IL-2Rβ ligand of Formula (3)-(3e), X⁸ can be Q.

[0326] In an IL-2Rβ ligand of Formula (3)-(3e), X⁹ can be selected from I, L, and V.

[0327] In an IL-2Rβ ligand of Formula (3)-(3e), X⁹ can be selected from L and V.

[0328] In an IL-2Rβ ligand of Formula (3)-(3e), X¹⁰ can be G.

[0329] In an IL-2Rβ ligand of Formula (3)-(3e), X¹¹ can be selected from D and E.

[0330] In an IL-2Rβ ligand of Formula (3)-(3e), X¹¹ can be E.

[0331] In an IL-2Rβ ligand of Formula (3)-(3e), X¹² can be selected from L and V.

[0332] In an IL-2Rβ ligand of Formula (3)-(3e), X¹² can be L.

[0333] In an IL-2Rβ ligand of Formula (3)-(3e), X¹³ can be selected from D and E.

[0334] In an IL-2Rβ ligand of Formula (3)-(3e), X¹³ can be D.

[0335] In an IL-2Rβ ligand of Formula (3)-(3e), X¹⁴ can be selected from F, I, L, and M.

[0336] In an IL-2Rβ ligand of Formula (3)-(3e), X¹⁴ can be L.

[0337] In an IL-2Rβ ligand of Formula (3)-(3e), X¹⁵ can be selected from D, E, F, G, and V.

[0338] In an IL-2Rβ ligand of Formula (3)-(3e), X¹⁵ can be selected from D, E, F, and G.

[0339] In an IL-2Rβ ligand of Formula (3)-(3e), X¹⁶ can be selected from D, E, G, K, P, V, and W.

[0340] In an IL-2Rβ ligand of Formula (3)-(3e), X¹⁶ can be G.

[0341] In an IL-2Rβ ligand of Formula (3)-(3e), X¹⁷ can be selected from A, E, G, P, Q, S, T, V, and W.

[0342] In an IL-2Rβ ligand of Formula (3)-(3e), X¹⁷ can be G.

[0343] In an IL-2Rβ ligand of Formula (3)-(3e), the IL-2Rb ligand can be defined by any combination of X¹ to X¹⁷ as defined in the immediately preceding thirty one (31) paragraphs.

[0344] In an IL-2Rβ ligand of Formula (3)-(3e),
[0345] X¹ can be selected from A, D, E, G, R, S, T, V, and W;
[0346] X² can be selected from F, L, S, V, W, and Y;
[0347] X³ can be selected from F, H, K, L, N, Q, W, and Y;
[0348] X⁴ can be selected from D and P;
[0349] X⁵ can be selected from F, L, S, W, and Y;
[0350] X⁶ can be selected from F, I, K, L, M, R, and V;
[0351] X⁷ can be A;
[0352] X⁸ can be selected from H, K, L, Q, R, and S;
[0353] X⁹ can be selected from I, L, and V;
[0354] X¹⁰ can be G;
[0355] X¹¹ can be selected from D and E;
[0356] X¹² can be selected from L and V;
[0357] X¹³ can be selected from D and E;
[0358] X¹⁴ can be selected from F, I, L, and M;
[0359] X¹⁵ can be selected from D, E, F, G, and V;
[0360] X¹⁶ can be selected from D, E, G, K, P, V, and W;
[0361] X¹⁷ can be selected from A, E, G, P, Q, S, T, V, and W.

[0362] In an IL-2Rβ ligand of Formula (3)-(3e),
[0363] X¹ can be selected from G, R, and W;
[0364] X² can be selected from F and W;
[0365] X³ can be selected from F, H, L, W, and Y;
[0366] X⁴ can be selected from D and P;
[0367] X⁵ can be selected from F, W, and Y;
[0368] X⁶ can be selected from I, L, and M;
[0369] X⁷ can be A;
[0370] X can be Q;
[0371] X⁹ can be selected from L and V;
[0372] X¹⁰ can be G;
[0373] X¹¹ can be E;
[0374] X¹² can be L;
[0375] X¹³ can be D;
[0376] X¹⁴ can be L;
[0377] X¹⁵ can be selected from D, E, F, and G;
[0378] X¹⁶ can be G; and
[0379] X¹⁷ can be G.

[0380] An IL-2Rβ ligand can comprise the amino acid sequence of any one of SEQ ID NO: 2667-2891.

SEQ ID NO: 2667
W Y P C W I A Q L G E L C D L D A K G Q R R
SEQ ID NO: 2668
T N N F Y P C W L A K L G D L C D F D D L N
SEQ ID NO: 2669
W Y P C W I A R V G E L C D L E E G P V N R
SEQ ID NO: 2670
A V E F Y P C W L A R I G E L C D L V E P
SEQ ID NO: 2671
W Y P C W I A H L G E L C D L E
SEQ ID NO: 2672
W Y P C W I A R V G E L C D M E
SEQ ID NO: 2673
R R E W Y P C W I A Q V G E L C D L P L I
SEQ ID NO: 2674
R W P W Y P C E I A R I G E L C D L E Q A N
SEQ ID NO: 2675
F G A F Y P C W K A Q L G E L C D L E P V T
SEQ ID NO: 2676
H G R W F P C W M A Q V G D L C D L E H S N
SEQ ID NO: 2677
W Y P C W L A K L G E L C D L D R A E A L P
SEQ ID NO: 2678
V W F P C W F A Q L G D L C D L D Q D P
SEQ ID NO: 2679
E T L G S V W Y P C W I A S I G E L C D L D
SEQ ID NO: 2680
W Y S C W I A Q L G E L C D L D D M G D R V
SEQ ID NO: 2681
W F P C W L A Q L G E L C D K E
SEQ ID NO: 2682
W Y P C W I A Q L G E L C D L V
SEQ ID NO: 2683
S H L W F P C W M A Q L G E L C D L E G G P
SEQ ID NO: 2684
R R W L P C W M A H V G E L C D L E L G N
SEQ ID NO: 2685
Y W C W F A R V G E L C D L D D G G V P S
SEQ ID NO: 2686
W Y S C W I A Q I G E L C D L E
SEQ ID NO: 2687
M N P V G T F Y P C W I A K L G E L C D L Q
SEQ ID NO: 2688
H G G V I G W Y P C W M A K V G E L C D L D
SEQ ID NO: 2689
W Y P C S I A L L G E L C D L E S V H E K S
SEQ ID NO: 2690
E Q R N R Q W W P C W L A R L G D L C D L D
SEQ ID NO: 2691
W Y P C W L A Q L G E L C D L D
SEQ ID NO: 2692
W L P C W M A H L G D L C D L E
SEQ ID NO: 2693
R P S W A P C W L A Q V G E L C D L D H P E
SEQ ID NO: 2694
E S K E P A F W P C W M A Q L G D L C D L E
SEQ ID NO: 2695
R S L R E S W F P C W M A K L G D L C D L E
SEQ ID NO: 2696
W H P C W L A R V G D L C D L D
SEQ ID NO: 2697
S R S A G E Y Y P C W L A Q L G E L C D L A
SEQ ID NO: 2698
R Q V P K Q W Y P C W M A A L G E L C D L E
SEQ ID NO: 2699
W Y P C W L A H L G E L C D L E
SEQ ID NO: 2700
Q V M R L W Y P C W M A Q L G E L C D L E
SEQ ID NO: 2701
W Y P C W M A Q L G E L C D L D E A P V Q P
SEQ ID NO: 2702
R D I W W P C W V A Q L G E L C D L D D P Q
SEQ ID NO: 2703
S A T W Y P C F L A N L G E L C D L E Q E N
SEQ ID NO: 2704
Y A E W Y P C W M A R V G E V C D L E V T P
SEQ ID NO: 2705
R S G D K A F F P C W L A Q L G D L C D L D
SEQ ID NO: 2706
W Y P C W M A Q L G E L C D M D
SEQ ID NO: 2707
R V S Y P C W L A R L G E L C D M D L E E
SEQ ID NO: 2708
T E S W Y P C W L A N L G D L C D L E W S A
SEQ ID NO: 2709
W L P C W M A D V G D L C D L D
SEQ ID NO: 2710
W H P C W M A R L G E L C D L D
SEQ ID NO: 2711
Q G T K W H W N P C W M A Q L G E L C D L D
SEQ ID NO: 2712
K N G P K S W Y P C W M A Q V G D L C D L D
SEQ ID NO: 2713
S G T G P A W Y P C F L A S L G Q L C D L E
SEQ ID NO: 2714
W Y P C W M A R M G E L C D L E
SEQ ID NO: 2715
W L P C W R A Q L G Q L C D L D
SEQ ID NO: 2716
L F P C W L A Q L G E L C D L E
SEQ ID NO: 2717
R Y P C W I A Q L G E L C D L D
SEQ ID NO: 2718
W H P C W I A H L G E L C D L E
SEQ ID NO: 2719
M Y P C W I A H L G E L C D L D
SEQ ID NO: 2720
W Y P C S I A S L G E L C D L E
SEQ ID NO: 2721
W L P C Y M A Q L G D L C D L E
SEQ ID NO: 2722
W H P C W M A Q V G E V C D L D
SEQ ID NO: 2723
W Y P C W L A S L G E V C D L E
SEQ ID NO: 2724
W W P C S I A R L G Q L C D L D
SEQ ID NO: 2725
W Y P C W L A H L G E L C D L A
SEQ ID NO: 2726
W Y P C W L A Q L G E L C D A E
SEQ ID NO: 2727
W K P C W M A L L G E L C D L E
SEQ ID NO: 2728
R Y P C W R A K L G E L C D L D
SEQ ID NO: 2729
E E Q S R G F L P C W M A L L G E L C D L D
SEQ ID NO: 2730
L G S K R Q W Y P C W V A H L G E L C D L E
SEQ ID NO: 2731
E S E G R G W Y P C W N A L L G E L C D L E
SEQ ID NO: 2732
R W T Q A Q W Y P C W L A Q L G E L C D L E
SEQ ID NO: 2733
L H A G R W N P C W L A Q L G E L C D L E
SEQ ID NO: 2734
L S S K G W Y P C W K A R L G D L C D L E
SEQ ID NO: 2735
D M F T H R W Y P C S M A K L G E L C D L E
SEQ ID NO: 2736
M T D R A F W N P C W V A R L G E L C D L D
SEQ ID NO: 2737
N V T Y T Q W F P C W L A R L G E L C D L V
SEQ ID NO: 2738
V R T R I W Y P C W S A Q L G E L C D L D
SEQ ID NO: 2739
A M A R R Y L P C W I A K L G E L C E L D
SEQ ID NO: 2740
A R G E Y R W F P C W M A R L G E L C D L E
SEQ ID NO: 2741
Y L E R S R W Y P C F I A Q L G E L C D L E
SEQ ID NO: 2742
F R V S R D W F P C W M A Q L G E V C D L E
SEQ ID NO: 2743
I E R A W E W R P C W L A S V G E L C D L E
SEQ ID NO: 2744
V A S E R F Y P C W I A R L G E L C D V E
SEQ ID NO: 2745
W Y P C W I A K L G E V C D L D Q G T T R Q
SEQ ID NO: 2746
W Y P C W L A H L G E L C D L D W K G R N D
SEQ ID NO: 2747
W Y P C W R A Q L G E L C D L V D L G S H L
SEQ ID NO: 2748
W S P C W M A S L G D L C D L E E T R Q T E
SEQ ID NO: 2749
W T P C W I A Q L G E L C D L E G R H G T V
SEQ ID NO: 2750
L P C W I A Q L G D L C D L E P E P S P E
SEQ ID NO: 2751
F Y P C W A A H L G D L C D L E Y Q E A G P
SEQ ID NO: 2752
W L P C W L A P L G D L C D M D M S A V M N
SEQ ID NO: 2753
W R P C W M A H L G D L C D L E M A N E N P
SEQ ID NO: 2754
W Y P C W L A Q L G E V C D L D D G G G V F
SEQ ID NO: 2755
W W P C W L A Q L G E L C D L E V N G S L I
SEQ ID NO: 2756
T E M W Y P C W M A Y Q G E L C D L D M T Y
SEQ ID NO: 2757
A R T W W P C W R A K L G E L C D L V V P E
SEQ ID NO: 2758
H Q G F Y S C R L A R L G E L C D L D T G W
SEQ ID NO: 2759
V D E F Y P C S M A G L G E L C D L E R Q N
SEQ ID NO: 2760
A W D W Y P C S V A A L G E I C D L D I Q D
SEQ ID NO: 2761
R P P W Y P C W M A R L G E V C D M D I M L
SEQ ID NO: 2762
S Q R W Y P C W V A H L G E L C D L E G V V
SEQ ID NO: 2763
K G S W Q P C W F A K L G E L C D L H P T S
SEQ ID NO: 2764
Q T W Y L P C W M A K L G E L C D L G E R D
SEQ ID NO: 2765
E P R W Y P C W M A Q M G E L C D M E M S D
SEQ ID NO: 2766
W G G R Y W C W M A K L G D L C D L E D E W
SEQ ID NO: 2767
W W P C W I A Q V G E L C D L D G P G R P T
SEQ ID NO: 2768
R L V Y D C L F A Q V G D L C E V I S
SEQ ID NO: 2769
W R I L W M Q Q C W R S H V V N Q C A L
SEQ ID NO: 2770
W Y P C W I A Q V G E L C D L D E V S H G R
SEQ ID NO: 2771
T G E W W P C W V A E V G E L C D L E R G P
SEQ ID NO: 2772
A R T Q G W Y D C L F A Q V G E L C D L
SEQ ID NO: 2773
F H P C W R A L L G E L C D L E T A L G P S
SEQ ID NO: 2774
L Q I R K L W A C R I D L V G P F C L L
SEQ ID NO: 2775
A E Y S G R Y D C Y I A K V G E L C D I
SEQ ID NO: 2776
S W R F L W Q D C G R A H V G E L C D L
SEQ ID NO: 2777
N R W W H P C W M A R V G E L C D L E P D A
SEQ ID NO: 2778
W W P C W V A K L G E L C D L E G D A S R V
SEQ ID NO: 2779
W Y P C E F A Q L G E L C D L L P F P Y P A
SEQ ID NO: 2780
S Y M H D C F M A Q V G D L C D R F I S
SEQ ID NO: 2781
W W P C W I A Q V G E L C D L E E E S R E S
SEQ ID NO: 2782
K W A W N P C Y I A R L G E L C D L V E P E
SEQ ID NO: 2783
W W P C W I A D L G E L C D L E G P P R G R
SEQ ID NO: 2784
P T L I T W Y D C L F A E V G E L C D M
SEQ ID NO: 2785
E 1 S N W F L D C M F A D V G D L C D L
SEQ ID NO: 2786
A Q V W Y P C W L A K V G E L C D L D Q W N
SEQ ID NO: 2787
F G G K M D W Y P C W I A N L G E L C D L K
SEQ ID NO: 2788
W F P C W M A K V G D L C D V D E H Q D P S
SEQ ID NO: 2789
M G D S S S W F P C W M A Q L G E L C D M E
SEQ ID NO: 2790
M F R Y Y P C W I A S I G E L C D L E W G V
SEQ ID NO: 2791
E R R W Y P C W L A S V G E L C D L D M G D
SEQ ID NO: 2792
W Y P C W V A Q L G E L C D L E
SEQ ID NO: 2793
R W D Y W P C Y I A Q V G E L C D L E V Y E
SEQ ID NO: 2794
S L A H R S W Y P C W L A Q V G E L C D L D
SEQ ID NO: 2795
Q N A S K G W Y P C W I A H V G E L C D W D
SEQ ID NO: 2796
H R W Y P C W L A H L G E L C D L D P M S
SEQ ID NO: 2797
F Y P C W I A F V G E L C D L E
SEQ ID NO: 2798
E G H W Y P C W I A Q L G E L C D L D W
SEQ ID NO: 2799
W T G W S A F Y P C S I A N L G E L C D L D
SEQ ID NO: 2800
W E K L Q N W Y P C W I A Q M G E L C D L E
SEQ ID NO: 2801
T N G V L D W W P C W M A Q V G E L C D L D
SEQ ID NO: 2802
W Y P C W V A K L G E L C D L E
SEQ ID NO: 2803
A Y Y P C E L A Q L G E L C D L Y N I
SEQ ID NO: 2804
W Y P C W M A H L G E L C D L E
SEQ ID NO: 2805
N D H T A W W P C Y F A Q V G D L C D L V
SEQ ID NO: 2806
W W P C E I A Q I G E L C D L E W V R H A E
SEQ ID NO: 2807
W W P C D F A Q I G E L C D L G P R F T G E
SEQ ID NO: 2808
R D W W L P C E F A L I G E L C D L E R S W
SEQ ID NO: 2809
M R T T F W Y D C Y I A Q V G E L C D F
SEQ ID NO: 2810
S W H A E T W Y P C W L A Q V G E L C D L D
SEQ ID NO: 2811
E W F H D C F L A K V G D L C D L F L W
SEQ ID NO: 2812
S G K T Q M W N P C Y V A K V G E L C D L V
SEQ ID NO: 2813
D K A G P N F Y P C W L A H V G E L C D Q A
SEQ ID NO: 2814
A G F R G R W W P C E Y A Q V G E L C D L E
SEQ ID NO: 2815
W F P C W L A K V G E L C D R D D L A G P S
SEQ ID NO: 2816
W W P C E W A R I G E L C D L E
SEQ ID NO: 2817
K G S S W F P C Y F A Q V G D L C D L Y
SEQ ID NO: 2831
W Y P C W L A Q V G E L C D R E
SEQ ID NO: 2819
R G V Y F P C W L A K V G D L C D S D E F
SEQ ID NO: 2820
R A W W W P C E L A Q V G E L C D L E P S S
SEQ ID NO: 2821
W Y P C W L A K V G E L C D Q E
SEQ ID NO: 2822
R Y V P D C L K A Q V G D L C D F F A W
SEQ ID NO: 2823
W W P C Y L A Q I G E L C D L V
SEQ ID NO: 2824
W Y P C W M A K V G E L C D M E
SEQ ID NO: 2825
Q I T D S G W Y P C W V A K V G E L C D M D
SEQ ID NO: 2826
Y R W W Y P C D I A Q V G E L C D L D Y L L
SEQ ID NO: 2827
C Y M H D C F M A Q V G D L C D R F I S
SEQ ID NO: 2828
W L P C W I A K I G D L C D L D
SEQ ID NO: 2829
S R V W H P C W L A R V G E L C D L E V S D
SEQ ID NO: 2830
W E H E F T W Y P C W I A Q V G E L C D M D
SEQ ID NO: 2831
H R G W V G W Y P C E Y A L P G Q L C D L E
SEQ ID NO: 2832
W Y P C W L A Q L G E L C D Q D W D T P S
SEQ ID NO: 2833
R V R R H S W W P C E I A V V G E L C D L E
SEQ ID NO: 2834
D G W W P C W I A Q V G E L C D L E D P V
SEQ ID NO: 2835
L P F Q D C Y I A Q V G E L C D L P G T
SEQ ID NO: 2836
R W M F D C L F A R V G E L C D I R P W
SEQ ID NO: 2837
G G Y Y D C L I A E V G E L C D M P G Q
SEQ ID NO: 2838
V V C Y A C D I A H V G E L C D L T C R
SEQ ID NO: 2839
T P W Y D C Y I A N V G D L C D F A S A
SEQ ID NO: 2840
L E S L D C F F A R 1 G D L C E I W D V
SEQ ID NO: 2841
W Q I F D C Y L A Q V G E L C D L Q D T
SEQ ID NO: 2842
G R Y P D C Y I A H V G E L C E F Y D G
SEQ ID NO: 2843
F G D D F C R F I P L F E M C T T D V E
SEQ ID NO: 2844
L V Y Y D C Y M A Q V G E L C D L P S L
SEQ ID NO: 2845
V S R Y D C Y I A K V G E L C D F F E F
SEQ ID NO: 2846
V T V Q D C Y F A R V G D L C D L F S P
SEQ ID NO: 2847
W E W Y D C L M A Q V G E L C D F E G N
SEQ ID NO: 2848
W A F Y D C R N A Q V G D F C D L W E F
SEQ ID NO: 2849
S M D Q D C Y F A Q V G E L C V L F N Q
SEQ ID NO: 2850
G G Y Y D C L I A E V G E L C D I Y G R
SEQ ID NO: 2851
S N W H D C L F A Q V G E L C D L P G S
SEQ ID NO: 2852
Y D C Y I A Q V G E L C D I
SEQ ID NO: 2853
S W L S D L Q D C Y I A Q V G D L C Q I
SEQ ID NO: 2854
SEQ ID NO: 2855
R L A S D W W D C Y I A K V G E L C D F
SEQ ID NO: 2856
R L L R D C F L A K V G D L C E L F V W
SEQ ID NO: 2857
Q W F H N C F L A R V G D T C D L F L W
SEQ ID NO: 2858
E L L V D C F K V K V G E L C D L F F G
SEQ ID NO: 2859
R Y V H D C F I A Q V G D L C D L F L H
SEQ ID NO: 2860
K W V H D C F L A K V G D V C D L F V V
SEQ ID NO: 2861
R S L V D C F L V K V G D L C D F F N W
SEQ ID NO: 2862
R Y L Y D C F L A L V G D L C V K F H Q
SEQ ID NO: 2863
A H F Y D C F W A K A G E L C D L W P S
SEQ ID NO: 2864
K W F H D C F L A K V G D L C D L F L W
SEQ ID NO: 2865
W G K L V R D C F L A K V G D L C D L F L W
SEQ ID NO: 2866
T H V H D C F L A K V G D L C D L F I V
SEQ ID NO: 2867
H W V R D C F L A K V G E L C D L F L W
SEQ ID NO: 2868
H G I L D C Y F A K V G E L C E L F D W
SEQ ID NO: 2869
Q F V K D C F L A Q V G D L C E L F L W
SEQ ID NO: 2870
D W L P D C Y F A N V G D L C S L F G S
SEQ ID NO: 2871
H W F L D C F L A N V G D L C D F F G N
SEQ ID NO: 2872
N W L P D C L F A N V G E L C D I F P W
SEQ ID NO: 2873
E I F K D C L F A N V G E L C E I F P S
SEQ ID NO: 2874
N W F H D C F L A R V G D L C D L F L D
SEQ ID NO: 2875
Y S F K D C Y F A K V G E L C E L F L W
SEQ ID NO: 2876
E F F H D C Y V A R V G E L C D L F G W
SEQ ID NO: 2877
S Y L C W L D H W G V I C E E D
SEQ ID NO: 2878
W Y T C M M D W L G V H C E L E
SEQ ID NO: 2879
Q M V W W D C W S T Q E G P V C E L N W T A
SEQ ID NO: 2880
Y W C S V W Q L G S V C E M N N E E T Q
SEQ ID NO: 2881
W T C W L T Q L G Y D C N L D V V D Q S L G
SEQ ID NO: 2882
D G S W Y T C W F T Q L G E W C E Q D D A K
SEQ ID NO: 2883
E F W G W Q C W Q E P L G W S C D L E W M D
SEQ ID NO: 2884
W Y P C W I A R V G E L C D L E
SEQ ID NO: 2885
W Y P C W L A Q V G E L C D L D
SEQ ID NO: 2886
L V D C F K V K V G E L C D L F
SEQ ID NO: 2887
V H D C F I A Q V G D L C D L F
SEQ ID NO: 2888
W P C W A A L G E L C D L D
SEQ ID NO: 2889
W P C W A L G E L C D L D
SEQ ID NO: 2890
W P C W L G E L C D L D
SEQ ID NO: 2891
W Y P C W G E L C D L D

[0381] An IL-2Rβ ligand provided by the present disclosure can comprise a truncated amino acid sequence of any one of SEQ ID NOS: 2661-2891.

[0382] An IL-2Rβ ligand provided by the present disclosure can comprise an amino acid sequence selected from any one of SEQ ID NOS: 2661-2891, or a truncated amino acid sequence of any one of SEQ ID NOS: 2661-2891, wherein the amino acid sequence can independently comprise from 1 to 4 glycines (G) (SEQ ID NO: 9429) on the N-terminus, on the C-terminus, or on both the N- and C-termini.

[0383] An IL-2Rβ ligand provided by the present disclosure can comprise an amino acid sequence selected from any one of SEQ ID NOS: 2661-2891, or a truncated amino acid sequence of any one of SEQ ID NOS: 2661-2891, wherein the amino acid sequence comprises one or more amino acid substitutions such as from 1 to 5 amino acid substitutions. The amino acid substitutions can comprise conservative amino acid substitutions.

[0384] An IL-2Rβ ligand can comprise an amino acid sequence having an amino acid sequence similarity greater than 60%, greater than 70%, greater than 75%, greater than 80%, greater than 85%, greater than 90%, or greater than 95% to the amino acid sequence of any one of SEQ ID NOS: 2661-2891 or to a truncated amino acid sequence of any one of SEQ ID NOS: 2661-2891.

[0385] An IL-2Rβ ligand of any one of SEQ ID NOS: 2661-2891, a truncated IL-2Rβ ligand of any one of SEQ ID NOS: 2661-2891, or a substituted IL-2Rβ ligand of any one of SEQ ID NOS: 2661-2891 can bind to the hIL-2Rβ subunit with an IC50 of less than 100 μM or less than 10 μM and to the cynoIL-2Rβ subunit with an IC50 of less than 100 μM or less than 10 μM as determined using phage ELISA competition assays.

[0386] An IL-2Rβ ligand of any one of SEQ ID NOS: 2667-2891 bound to the hIL-2Rβ subunit with an IC50 of less than 100 μM as determined using phage ELISA competition assays.

[0387] An IL-2Rβ ligand provided by the present disclosure can comprise the amino acid sequence of Formula (4) (SEQ ID NO: 2900), an amino acid sequence of Formula (4a) (SEQ ID NO: 2901), an amino acid sequence of Formula (4b) (SEQ ID NO: 2902), an amino acid sequence of Formula (4c) (SEQ ID NO: 2903), an amino acid sequence of Formula (4d) (SEQ ID NO: 2904), an amino acid sequence of Formula (4e) (SEQ ID NO: 2905), or an amino acid sequence of Formula (4f) (SEQ ID NO: 2906):

-X¹-X²-X³-X⁴-X⁵-C-X⁶-X⁷-X⁸-X⁹-X¹⁰-X-X²-X¹³-C-X¹⁴-X⁵-X⁶-X⁷-X¹⁸- (4)

-X²-X³-X⁴-X⁵-C-X⁶-X⁷-X⁸-X⁹-X¹⁰-X¹¹-X¹²-X¹³-C-X¹⁴-X¹⁵-X¹⁶-X¹⁷- (4a)

-X³-X⁴-X⁵-C-X⁶-X⁷-X⁸-X⁹-X¹⁰-X-X²-X¹³-C-X¹⁴-X⁵-X⁶- (4b)

-X⁴-X⁵-C-X⁶-X⁷-X⁸-X⁹-X¹⁰-X¹¹-X¹²-X¹³-C-X¹⁴-X⁵- (4c)

-X⁵-C-X⁶-X⁷-X⁸-X⁹-X¹⁰-X¹¹-X¹²-X¹³-C-X¹⁴- (4d)

-C-X⁶-X⁷-X⁸-X⁹-X¹⁰-X¹¹-X¹²-X¹³-C- (4e)

-X⁶-X⁷-X⁸-X⁹-X¹⁰-X¹¹-X¹²-X¹³- (4f)

[0388] wherein,
[0389] X¹ can be selected from A, D, E, H, K, N, Q, R, and T;
[0390] X² can be selected from F, G, H, I, L, S, W, and Y;
[0391] X³ can be selected from F, I, L, and V;
[0392] X⁴ can be selected from H. K, L, P, R, V, and Y;
[0393] X⁵ can be D;
[0394] X⁶ can be selected from F, L, and Y;
[0395] X⁷ can be selected from F, I, K, L, V, and W;
[0396] X can be selected from A and V;
[0397] X⁹ can be selected from K, L, N, Q, and R;
[0398] X¹⁰ can be selected from A and V;
[0399] X¹¹ can be G;
[0400] X¹² can be selected from D and E
[0401] X¹³ can be selected from L, T, and V;
[0402] X¹⁴ can be selected from D, E, S, and V;
[0403] X¹⁵ can be selected from F, I, K, and L;
[0404] X¹⁶ can be selected from F and W;
[0405] X¹⁷ can be selected from D, F, G, I, L, N, P, V; and
[0406] X¹⁸ can be selected from D, G, H, N, Q, S V, and W.

[0407] In an IL-2Rβ ligand of Formula (4)-(4e), X² can be W.

[0408] In an IL-2Rβ ligand of Formula (4)-(4e), X⁶ can be F.

[0409] In an IL-2Rβ ligand of Formula (4)-(4e), X⁷ can be selected from F and L

[0410] In an IL-2Rβ ligand of Formula (4)-(4e), X⁸ can be A.

[0411] In an IL-2Rβ ligand of Formula (4)-(4e), X⁹ can be K.

[0412] In an IL-2Rβ ligand of Formula (4)-(4e), X¹⁰ can be V.

[0413] In an IL-2Rβ ligand of Formula (4)-(4e), X¹³ can be L.

[0414] In an IL-2Rβ ligand of Formula (4)-(4e), X¹⁴ can be D.

[0415] In an IL-2Rβ ligand of Formula (4)-(4e), X¹⁵ can be L.

[0416] In an IL-2Rβ ligand of Formula (4)-(4e), X¹⁶ can be F.

[0417] In an IL-2Rβ ligand of Formula (4)-(4e), X¹⁷ can be L.

[0418] In an IL-2Rβ ligand of Formula (4)-(4e), X¹⁸ can be W.

[0419] In an IL-2Rβ ligand of Formula (4)-(4e), the IL-2Rb ligand can be defined by any combination of X¹ to X¹⁸ as defined in the immediately preceding twelve (12) paragraphs.

[0420] An IL-2Rβ ligand can comprise the amino acid sequence of any one of SEQ ID NO: 2907-2926.

SEQ ID NO: 2907
A F F H D C F F A K A G D L C D F F D D
SEQ ID NO: 2908
D F F H D C F F A K V G D L C D F F F G
SEQ ID NO: 2909
E G F H D C F F A K V G D L C D I F G H
SEQ ID NO: 2910
E H F H D C F F A K V G D L C D I F G N
SEQ ID NO: 2911
E H F H D C F F A K V G D L C D K F G Q
SEQ ID NO: 2912
H I F H D C F I A K V G D L C D L F H S
SEQ ID NO: 2913
H L F H D C F K A K V G D L C D L F I S
SEQ ID NO: 2914
H L F K D C F L A K V G D L C D L F L S
SEQ ID NO: 2915
W G K S I K D C F L A K V G D L C D L F L V
SEQ ID NO: 2916
K S L K D C F L A K V G D L C D L F L V
SEQ ID NO: 2917
K W L L D C F L A L V G D L C D L F L W
SEQ ID NO: 2918
N W L L D C F L A N V G D L C D L F L W
SEQ ID NO: 2919
N W L P D C F L A N V G E L C D L F L W
SEQ ID NO: 2920
Q W L P D C F L A N V G E L C D L F L W
SEQ ID NO: 2921
Q W V R D C L L A N V G E L C E L F L W
SEQ ID NO: 2922
R W V R D C L L A Q V G E L C E L F N W
SEQ ID NO: 2923
R W V V D C Y L A Q V G E L C E L F P W
SEQ ID NO: 2924
R W V V D C Y L A R V G E L C E L F P W
SEQ ID NO: 2925
T Y V Y D C Y V V R V G E T C S L F P W
SEQ ID NO: 2926
Y Y V Y N C Y W V R V G E V C V L W V W

[0421] An IL-2Rβ ligand provided by the present disclosure can comprise a truncated amino acid sequence of any one of SEQ ID NOS: 2900-2926.

[0422] An IL-2Rβ ligand provided by the present disclosure can comprise an amino acid sequence selected from any one of SEQ ID NOS: 2900-2926, or a truncated amino acid sequence of any one of SEQ ID NOS: 2900-2926, wherein the amino acid sequence can independently comprise from 1 to 4 glycines (G) (SEQ ID NO: 9429) on the N-terminus, on the C-terminus, or on both the N- and C-termini.

[0423] An IL-2Rβ ligand provided by the present disclosure can comprise an amino acid sequence selected from any one of SEQ ID NOS: 2900-2926, or a truncated amino acid sequence of any one of SEQ ID NOS: 2900-2926, wherein the amino acid sequence comprises one or more amino acid substitutions such as from 1 to 5 amino acid substitutions. The amino acid substitutions can comprise conservative amino acid substitutions.

[0424] An IL-2Rβ ligand can comprise an amino acid sequence having an amino acid sequence similarity greater than 60%, greater than 70%, greater than 75%, greater than 80%, greater than 85%, greater than 90%, or greater than 95% to the amino acid sequence of any one of SEQ ID NOS: 2900-2926 or to a truncated amino acid sequence of any one of SEQ ID NOS: 2900-2926.

[0425] An IL-2Rβ ligand of any one of SEQ ID NOS: 2900-2926, a truncated IL-2Rβ ligand of any one of SEQ ID NOS: 2900-2926, or a substituted IL-2Rβ ligand of any one of SEQ ID NOS: 2900-2926 can bind to the hIL-2Rβ subunit with an IC₅₀ of less than 100 μM or less than 10 μM as determined using phage ELISA competition assays.

[0426] An IL-2Rβ ligand of any one of SEQ ID NOS: 2907-2926 bound to the hIL-2Rβ subunit with an IC₅₀ of less than 100 μM as determined using phage ELISA competition assays.

[0427] Certain IL-2Rβ ligands having SEQ ID NOS: 2575-2655, 2661-2891, 2900-2986, and 2929-2939 bound to the hIL-2Rβ subunit with an IC₅₀ of less than 100 μM and to the cyno-IL-2Rβ subunit with an IC₅₀ of less than 100 μM as determined using phage ELISA competition assays.

[0428] An IL-2Rβ ligand can have the amino acid sequence of any of SEQ ID NOS: 911-930, 2929-2939, 9301 and 9308:

SEQ ID NO: 911
G G Y D C R I A Q V G E L C D L G G
SEQ ID NO: 912
G V Q Y K K C W M A Q L G D L C E L D P S G G
SEQ ID NO: 913
G G Y P C W M A Q L G E L C D L G G R R
SEQ ID NO: 9301
G G W Y P C W M A Q L G E L C D L D G G
SEQ ID NO: 915
G G W Y P C W M A Q L G E L C D L D G G R R
SEQ ID NO: 916
G G Y P C H M A Q L G E L C D L W S W G D I G G R R
SEQ ID NO: 917
F Y P C W T A L L G E L C D L E P G P P A M G G
SEQ ID NO: 918
W R R W Y P C W V A Q V G E L C D L E I E A G G
SEQ ID NO: 919
R Q R W Y P C W M A R L G E L C D L D E P T G G
SEQ ID NO: 920
W Y P C W M A Q L G D L C D L E K P V T E R G G
SEQ ID NO: 9308
G G W Y P C W M A Q L G E L C D L D
SEQ ID NO: 921
G G F Y P C W T A L L G E L C D L E P G P P A M G G
SEQ ID NO: 922
G G W G T T W R W Y P C W M A Q L G E L C D L E G G
SEQ ID NO: 923
G G D V L G D R W Y P C W I A K G E L C D L D G G
SEQ ID NO: 924
G G W P C W I A Q L G E L C D L D G G
SEQ ID NO: 925
G G W Y P C W L A K L G E L C D L D G G
SEQ ID NO: 926
G G W Y P C W M A Q L G D L C D L E K P V T E R G G
SEQ ID NO: 927
G G W R R W Y P C W V A Q V G E L C D L E I E A G G
SEQ ID NO: 928
G G R Q R W Y P C W M A R L G E L C D L D E P T G G
SEQ ID NO: 929
G G V Q Y K K C W M A Q L G D L C E L D P S G G
SEQ ID NO: 930
G G Y P C H M A Q L G E L C D L W S W G D I G G
SEQ ID NO: 2930
G G W Y P C W I A R V G E L C D L E E G P V N R
SEQ ID NO: 2931
G G A V E F Y P C W L A R I G E L C D L V E P
SEQ ID NO: 2932
G G W Y P C W I A R V G E L C D M E
SEQ ID NO: 2933
G G E W F H D C F L A K V G D L C D L F L G G E W
SEQ ID NO: 2934
G G R Y V H D C F I A Q V G D L C D L F L H
SEQ ID NO: 2935
G G R S L V D C F L V K V G D L C D F F N W
SEQ ID NO: 2936
G G W Y P C W I A R V G E L C D L E
SEQ ID NO: 2937
G G W Y P C W L A Q V G E L C D L D
SEQ ID NO: 2938
G G L V D C F K V K V G E L C D L F
SEQ ID NO: 2939
G G W Y S C W M A Q L G E L C D L D

[0429] An IL-2Rβ ligand can be selected from any one of IL-2Rβ ligands (BL1)-(BL12) and can have SEQ ID NO: 612, 664, 671, 865, 856, 858, 864, 869, 870, 874, 875, or 901, as shown in Table 1.

TABLE 1
IL-2Rβ Ligands.

| | | |
|---|---|---|
| (BL1) | SEQ ID NO: 671 | V Q Y K K C W M A Q L G D L C E L D P S |
| (BL2) | SEQ ID NO: 664 | Y P C H M A Q L G E L C D L W S W G D I |
| (BL3) | SEQ ID NO: 612 | Y P C W M A Q L G E L C D L |
| (BL4) | SEQ ID NO: 865 | W Y P C W M A Q L G E L C D L D |
| (BL5) | SEQ ID NO: 870 | W G T T W R W Y P C W M A Q L G E L C D L E |
| (BL6) | SEQ ID NO: 869 | F Y P C W T A L L G E L C D L E P G P P A M |
| (BL7) | SEQ ID NO: 856 | W R R W Y P C W V A Q V G E L C D L E I E A |
| (BL8) | SEQ ID NO: 858 | R Q R W Y P C W M A R L G E L C D L D E P T |
| (BL9) | SEQ ID NO: 864 | D V L G D R W Y P C W I A K L G E L C D L D |
| (BL10) | SEQ ID NO: 901 | W Y P C W M A Q L G D L C D L E K P V T E R |
| (BL11) | SEQ ID NO: 874 | W Y P C W I A Q L G E L C D L D |
| (BL12) | SEQ ID NO: 875 | W Y P C W L A K L G E L C D L D |

[0430] An IL-2Rβ ligand can comprise an amino acid sequence having an amino acid sequence similarity greater than 60%, greater than 70%, greater than 75%, greater than 80%, greater than 85%, greater than 90%, or greater than 95% to the amino acid sequence of any one of SEQ ID NOS: 612, 664, 671, 865, 856, 858, 864, 869, 870, 874, 875, and 901.

[0431] An IL-2Rβ ligand provided by the present disclosure can comprise a truncated amino acid sequence of any one of SEQ ID NOS: 612, 664, 671, 865, 856, 858, 864, 869, 870, 874, 875, and 901.

[0432] An IL-2Rβ ligand provided by the present disclosure can comprise an amino acid sequence selected from any one of SEQ ID NOS: 612, 664, 671, 865, 856, 858, 864, 869, 870, 874, 875, and 901, or a truncated amino acid sequence of any one of SEQ ID NOS: 612, 664, 671, 865, 856, 858, 864, 869, 870, 874, 875, and 901, wherein the amino acid sequence can independently comprise from 1 to 4 glycines (G) (SEQ ID NO: 9429) on the N-terminus, on the C-terminus, or on both the N- and C-termini.

[0433] An IL-2Rβ ligand provided by the present disclosure can comprise an amino acid sequence selected from any one of SEQ ID NOS: 612, 664, 671, 865, 856, 858, 864, 869, 870, 874, 875, and 901, or a truncated amino acid sequence of any one of SEQ ID NOS: 612, 664, 671, 865, 856, 858, 864, 869, 870, 874, 875, and 901, wherein the amino acid sequence comprises one or more amino acid substitutions such as from 1 to 5 amino acid substitutions. The amino acid substitutions can comprise conservative amino acid substitutions.

[0434] An IL-2Rβ ligand can comprise an amino acid sequence having an amino acid sequence similarity greater than 60%, greater than 70%, greater than 75%, greater than 80%, greater than 85%, greater than 90%, or greater than 95% to the amino acid sequence of any one of SEQ ID NOS: 612, 664, 671, 865, 856, 858, 864, 869, 870, 874, 875, and 901 or to a truncated amino acid sequence of any one of SEQ ID NOS: 612, 664, 671, 865, 856, 858, 864, 869, 870, 874, 875, and 901.

[0435] An IL-2Rβ ligand of any one of SEQ ID NOS: 612, 664, 671, 865, 856, 858, 864, 869, 870, 874, 875, and 901 can bind to the hIL-2Rβ subunit with an IC₅₀ of less than 10 μM as determined using phage ELISA competition assays.

[0436] An IL-2Rβ ligand of any one of SEQ ID NOS: 612, 664, 671, 865, 856, 858, 864, 869, 870, 874, 875, and 901, a truncated IL-2Rβ ligand of any one of SEQ ID NOS: 612, 664, 671, 865, 856, 858, 864, 869, 870, 874, 875, and 901, or a substituted IL-2Rβ ligand of any one of SEQ ID NOS: 612, 664, 671, 865, 856, 858, 864, 869, 870, 874, 875, and 901 can bind to the hIL-2Rβ subunit with an IC₅₀ of less than 100 μM or less than 10 μM as determined using phage ELISA competition assays.

[0437] Certain IL-2Rβ ligands provided by the present disclosure can bind to a specific binding site on the hIL-2Rβ subunit that is different than the hIL-2Rβ binding site on the hIL-2Rβ subunit to which IL-2 binds.

[0438] These IL-2Rβ ligands do not compete for binding to the specific IL-2 binding site with IL-2, have no detectable binding to the hIL-2Rγc subunit, and bind to the hIL-2Rβ subunit with an IC₅₀ of less than 10 μM.

[0439] The specific binding site on the hIL-2Rβ subunit can be characterized by at least the following properties: (1) a group of IL-2Rβ ligands bind to a specific binding site on the IL-2Rβ subunit with an IC₅₀ of less than 10 μM; (2) each IL-2Rβ ligands within the group competitively binds to the specific binding site on the IL-2Rβ subunit with each of the other IL-2Rβ ligands within the group; (3) a peptide having the amino acid sequence of SEQ ID NO: 1044 does not compete for binding to a specific binding site on the IL-2Rβ subunit with the peptides within the group of IL-2Rβ ligands; and (4) IL-2Rβ ligands having SEQ ID NOS: 58, 169, and 1042 do not bind competitively with IL-2 binding to IL-2Rβ, indicating that this IL-2Rβ ligand binding site is distinct from that of IL-2.

[0440] The group of IL-2Rβ ligands comprises at least the IL-2Rβ ligands having the amino acid sequence of any one of SEQ ID NOS: 58, 83, 142, 169, 170, and 663.

[0441] An IL-2Rγc ligand having the amino acid sequence of SEQ ID NO: 224 does not compete for binding to the specific binding site with the group of IL-2Rβ ligands.

[0442] This specific binding site on the IL-2Rβ subunit to which the group of IL-2Rβ ligands bind can be characterized using competitive binding assays as described, for example, in Example 27 and 28.

[0443] An IL-2Rβ ligand provided by the present disclosure can be a pH-biased IL-2Rβ ligand.

[0444] pH-Biased IL-2Rβ ligands can bind to the IL-2Rβ subunit with an IC50 at pH 6 that is at least 10% less than the IC50 for binding to the IL-2Rβ subunit at pH 7.5.

[0445] For example, the IC₅₀ for binding of a human IL-2Rβ ligand at pH 6.0 can be 0.5 μM, and the IC₅₀ for binding of the same IL-2Rβ ligand at pH 7.5 can be 1 μM. A pH-biased IL-2Rβ ligand can bind to the IL-2Rβ subunit at pH 6.0 with an IC₅₀ that is at least 10% less than the IC₅₀ for binding to the human IL-2Rβ subunit at pH 7.5, at least 25% less, at least 50% less, at least 100% less, or at least 200% less than the IC₅₀ for binding to the human IL-2Rβ subunit at pH 7.5.

[0446] A pH-biased binding affinity (IC₅₀) can be determined as described in Examples 24-27.

[0447] A pH-biased IL-2Rβ ligand can comprise, for example, from 5 to 30 amino acids.

[0448] A pH-biased IL-2Rβ ligand can bind to the human IL-2Rβ subunit at pH 6.0, for example, with an IC₅₀ from 1 μM to 100 μM and can bind to the human IL-2Rβ subunit with an IC₅₀ greater than 100 μM at pH 7.5.

[0449] A pH-biased IL-2Rβ ligand can bind to the human IL-2Rβ subunit at pH 6.0, for example, with an IC₅₀ from 0.1 μM to 50 μM and can bind to the human IL-2Rβ subunit with an IC₅₀ greater than 100 μM at pH 7.5.

[0450] A pH-biased IL-2Rβ ligand can bind to the human IL-2Rβ subunit at pH 6.0, for example, with an IC₅₀ of less than 100 μM and can bind to the human IL-2Rβ subunit, for example, with an IC₅₀ greater than 100 μM at pH 7.5.

[0451] A pH-biased IL-2Rβ ligand can bind to a mammalian IL-2Rβ subunit at pH 6.0, for example, with an IC₅₀ of less than 100 μM and can bind to the human IL-2Rβ subunit with an IC₅₀ greater than 100 μM at pH 7.5.

[0452] pH-biased IL-2Rβ ligands can be identified using the methods described in Examples 23 and 24. These methods, based on acidic-biased affinity selection, have been used to identify IL-2Rβ ligands having increased binding affinity at a pH less than pH 6.5 commensurate with a solid tumor microenvironment and having decreased binding affinity at a pH greater than pH 7.0 commensurate with that of normal tissue.

[0453] An IL-2Rγc ligand can include an IL-2Rγc ligand disclosed in U.S. Application Publication No. 2020/0040036 A1, which is incorporated by reference in its entirety.

[0454] An IL-2Rγc ligand provided by the present disclosure can bind to the human IL-2Rγc subunit with an IC₅₀ of less than 100 μM, less than 10 μM, less than 1 μM, less than 0.1 μM, or less than 0.01 μM.

[0455] An IL-2Rγc ligand provided by the present disclosure can bind to the human IL-2Rγc subunit with an IC₅₀ from 1 μM to 100 μM, from 10 μM to 10 μM, from 100 μM to 1 μM, from, 0.001 μM to 1 μM, or from 0.01 μM to 1 μM.

[0456] An IL-2Rγc ligand provided by the present disclosure can bind to a mammalian IL-2Rγc subunit with an IC₅₀, for example, of less than 100 μM, less than 10 μM, less than 1 μM, less than 0.1 μM, or less than 0.01 μM.

[0457] An IL-2Rγc ligand provided by the present disclosure can bind to a mammalian IL-2Rγc subunit with an IC₅₀, for example, from 1 μM to 100 μM, from 10 μM to 10 μM, from 100 μM to 1 μM, from, 0.001 μM to 1 μM, or from 0.01 μM to 1 μM.

[0458] An IL-2Rγc ligand can comprise the amino acid sequence of Formula (5) (SEQ ID NO: 944), Formula (5a) (SEQ ID NO: 945), Formula (5b) (SEQ ID NO: 946), Formula (5c) (SEQ ID NO: 947), Formula (5d) (SEQ ID NO: 948), and/or Formula (5e) (SEQ ID NO: 949):

-X¹⁷¹-X¹⁷²-X¹⁷³-X¹⁷⁴-X¹⁷⁵-C-X¹⁷⁶-X¹⁷⁷-X¹⁷⁸-X¹⁷⁹-X¹⁸⁰-X¹⁸¹-X¹⁸²-X¹⁸³-C-X¹⁸⁴-X¹⁸⁵-X¹⁸⁶-X¹⁸⁷-X₁₈₈- (5)

-X¹⁷²-X¹⁷³-X¹⁷⁴-X¹⁷⁵-C-X¹⁷⁶-X¹⁷⁷-X¹⁷⁸-X¹⁷⁹-X¹⁸⁰-X¹⁸¹-X¹⁸²-X¹⁸³-C-X¹⁸⁴-X¹⁸⁸-X¹⁸⁶-X¹⁸⁷- (5a)

-X¹⁷³-X¹⁷⁴-X¹⁷⁵-C-X¹⁷⁶-X¹⁷⁷-X¹⁷⁸⁷-X¹⁷⁹-X¹⁸⁰-X¹⁸¹-X¹⁸²-X¹⁸³-C-X¹⁸⁴-X¹⁸⁵-X¹⁸⁶- (5b)

-X¹⁷⁴-X¹⁷⁵-C-X¹⁷⁶-X¹⁷⁷-X¹⁷⁸-X¹⁷⁹-X¹⁸⁰⁰-X¹⁸¹-X¹⁸²-X¹⁸³-C-X¹⁴-X¹⁸⁵- (5c)

-X¹⁷⁵-C-X¹⁷⁶-X¹⁷⁷-X¹⁷⁸-X¹⁷⁹-X¹⁸⁰-X¹⁸¹-X¹⁸²-X¹⁸³-C-X¹⁸⁴- (5d)

-C-X¹⁷⁶-X¹⁷⁷-X¹⁷⁸-X¹⁷⁹-X¹⁸⁰-X¹⁸¹-X¹⁸²-X¹⁸³-C- (5e)
[0459] wherein, X¹⁷¹ can be selected from an amino acid comprising a basic side chain; X¹⁷² can be selected from an amino acid comprising a hydroxyl-containing side chain; X¹⁷³ can be selected from an amino acid comprising an acidic side chain or a large hydrophobic side chain; X⁷⁴ can be selected from an amino acid comprising a large hydrophobic side chain; X⁷⁵ can be selected from an amino acid comprising an acidic side chain or a large hydrophobic side chain; X¹⁷⁶ can be selected from an amino acid comprising an acidic side chain or a polar/neutral side chain; X⁷⁷ can be selected from an amino acid comprising an acidic side chain; X¹¹⁷ can be selected from an amino acid comprising a large hydrophobic side chain or an aromatic side chain; X¹⁷⁹ can be selected from an amino acid comprising an acidic side chain or a polar/neutral side chain; X¹⁸⁰ can be G; X¹⁸¹ can be V; X¹⁸² can be E; X¹⁸³ can be L; X¹⁸⁴ can be W; X¹⁸⁵ can be selected from an amino acid comprising a large hydrophobic side chain; X¹⁸⁶ can be E; X¹⁸⁷ can be selected from an amino acid; and X¹⁸⁸ can be selected from an amino acid comprising an acidic side chain.

[0460] In IL-2Rγc ligands of Formula (5), (5a), (5b), (5c), (5d), and/or (5e), X¹⁷¹ can be selected from H, K, and R; X¹⁷² can be selected from S, T, and Y; X¹⁷³ can be selected from D, E, F, I, L, M, V, W, and Y; X¹⁷⁴ can be selected from F, I, L, M, V, W, and Y; X¹⁷⁵ can be selected from D, E, F, I, L, M, V, W, and Y; X¹⁷⁶ can be selected from D, E, H, N, Q, S, T, and Y; X¹⁷⁷ can be selected from D and E; X¹⁷⁸ can be selected from F, H, I, L, M, V, W, and Y; X¹⁷⁹ can be selected from D, E, H, N, Q, S, T, and Y; X¹⁸⁰ can be G; X¹⁸¹ can be V; X¹⁸² can be E; X¹⁸³ can be L; X¹⁸⁴ can be W; X¹⁸⁵ can be selected from F, I, L, M, V, W, Y, H, N, Q, S, and T; X¹⁸⁶ can be E; X¹⁸⁷ can be selected from an amino acid; and X¹⁸⁸ can be selected from D and E.

[0461] In IL-2Rγc ligands of Formula (5), (5a), (5b), (5c), (5d), and/or (5e), X¹⁷¹ can be selected from D, E, G, H, K, M, N, P, Q, R, S, and T; X¹⁷² can be selected from A, D, E, G, I, K, L, P, Q, R, S, T, V, W, and Y; X¹⁷³ can be selected from A, D, E, F, G, I, Q, S, T, V, W, and Y; X⁷⁴ can be selected from A, I, E, I, L, M, N, Q, R, S, T, and V; X⁷⁵ can be selected from A, E, I, L, M, N, Q, R, S, T, and V; X¹⁷⁶ can be selected from D, E, H, L, Q, R, and V; X⁷⁷ can be selected from D, E, N, T, and V; X¹¹⁷ can be selected from F, S, W, and Y; X¹⁷⁹ can be selected from A, D, E, G, H, K, N, Q, R, and Y; X¹⁸⁰ can be selected from G and R; X¹⁸¹ can be V; X¹⁸² can be selected from D, E, and Y; X¹⁸³ can be selected from F, I, and L; X¹⁸⁴ can be W; X¹⁸⁵ can be selected from C, H, I, L, P, Q, T, V, and Y; X¹⁸⁶ can be selected from A, D, E, G, M, R, S, T, and V; X¹⁸⁷ can be selected from A, D, E, F, G, I, M, N, P, Q, R, S, T, V, W, and Y; and X¹⁸⁸ can be selected from A, C, D, E, F, G, I, K, L, N, P, Q, R, S, and V.

[0462] In IL-2Rγc ligands of Formula (5), (5a), (5b), (5c), (5d), and/or (5e), X¹⁷¹ can be selected from H, K, and R; X¹⁷² can be selected from S, T, and Y; X¹⁷³ can be selected from D, E, F, I, and V; X¹⁷⁴ can be selected from I and V; X¹⁷⁵ can be selected from E, I, L, M, and V; X¹⁷⁶ can be selected from D, E, and Q; X¹⁷⁷ can be selected from D and E; X¹⁷⁸ can be selected from F and W; X¹⁷⁹ can be selected from D, E, N, and Q; X¹⁸⁰ can be G; X¹⁸¹ can be V; X¹⁸² can be selected from D and E; X¹⁸³ can be L; X¹⁸⁴ can be W; X¹⁸⁵ can be selected from I, L, Q, and V; X¹⁸⁶ can be selected from D and E; X¹⁸⁷ can be selected from A, D, E, F, G, I, M, N, P, Q, R, S, T, V, W, and Y; and X¹⁸⁸ can be selected from D, E, N, and Q.

[0463] In IL-2Rγc ligands of Formula (5), (5a), (5b), (5c), (5d), and/or (5e), X¹⁷¹ can be selected from K and R; X¹⁷² can be selected from S, T, and Y; X¹⁷³ can be selected from D, E, F, I, and V; X¹⁷⁴ can be V; X¹⁷⁵ can be selected from E, L, M, and V; X¹⁷⁶ can be Q; X¹⁷⁷ can be selected from D and E; X¹⁷⁸ can be W; X¹⁷⁹ can be selected from D, E, N, and Q; X¹⁸⁰ can be G; X¹⁸¹ can be V; X¹⁸² can be E; X¹⁸³ can be L; X¹⁸⁴ can be W; X¹⁸⁵ can be selected from I, L, Q, and V; X¹⁸⁶ can be selected from D and E; X¹⁸⁷ can be selected from A, D, E, F, G, I, M, N, P, Q, R, S, T, V, W, and Y; and X¹⁸⁸ can be selected from D, E, N, and Q.

[0464] In IL-2Rγc ligands of Formula (5), X¹⁷¹ can be selected from H, K, and R.

[0465] In IL-2Rγc ligands of Formula (5)-(5a), X¹⁷² can be selected from S, T, and Y.

[0466] In IL-2Rγc ligands of Formula (5)-(5b), X¹⁷³ can be selected from D, E, F, I, L, M, V, W, and Y.

[0467] In IL-2Rγc ligands of Formula (5)-(5b), X¹⁷³ can be selected from D and E.

[0468] In IL-2Rγc ligands of Formula (5)-(5b), X¹⁷³ can be selected from F, I, L, M, V, W, and Y.

[0469] In IL-2Rγc ligands of Formula (5)-(5c), X¹⁷⁴ can be selected from F, I, L, M, V, W, and Y.

[0470] In IL-2Rγc ligands of Formula (5)-(5c), X¹⁷⁴ can be V.

[0471] In IL-2Rγc ligands of Formula (5)-(5d), X¹⁷⁵ can be selected from D, E, F, I, L, M, V, W, and Y.

[0472] In IL-2Rγc ligands of Formula (5)-(5d), X¹⁷⁵ can be selected from D and E.

[0473] In IL-2Rγc ligands of Formula (5)-(5d), X¹⁷⁵ can be selected from F, I, L, M, V, W, and Y.

[0474] In IL-2Rγc ligands of Formula (5)-(5e), X¹⁷⁶ can be selected from D, E, H, N, Q, S, T, and Y.

[0475] In IL-2Rγc ligands of Formula (5)-(5e), X¹⁷⁶ can be selected from E and Q.

[0476] In IL-2Rγc ligands of Formula (5)-(5e), X¹⁷⁷ can be selected from D and E.

[0477] In IL-2Rγc ligands of Formula (5)-(5e), X¹⁷⁸ can be selected from F, H, I, L, M, V, W, and Y.

[0478] In IL-2Rγc ligands of Formula (5)-(5e), X¹⁷⁸ can be selected from F, H, W, and Y.

[0479] In IL-2Rγc ligands of Formula (5)-(5e), X¹⁷⁸ can be W.

[0480] In IL-2Rγc ligands of Formula (5)-(5e), X¹⁷⁹ can be selected from D, E, H, N, Q, S, T, and Y.

[0481] In IL-2Rγc ligands of Formula (5)-(5e), X¹⁷⁹ can be selected from D, E, and Q.

[0482] In IL-2Rγc ligands of Formula (5)-(5e), X¹⁸⁰ can be G.

[0483] In IL-2Rγc ligands of Formula (5)-(5e), X¹⁸¹ can be V.

[0484] In IL-2Rγc ligands of Formula (5)-(5e), X¹⁸² can be E.

[0485] In IL-2Rγc ligands of Formula (5)-(5e), X¹⁸³ can be L.

[0486] In IL-2Rγc ligands of Formula (5)-(5d), X¹⁸⁴ can be W.

[0487] In IL-2Rγc ligands of Formula (5)-(5c), X¹⁸⁵ can be selected from F, I, L, M, V, W, and Y.

[0488] In IL-2Rγc ligands of Formula (5)-(5c), X¹⁸⁵ can be L.

[0489] In IL-2Rγc ligands of Formula (5)-(5b), X¹⁸⁶ can be E.

[0490] In IL-2Rγc ligands of Formula (5)-(5a), X¹⁸⁷ can be selected from an amino acid.

[0491] In IL-2Rγc ligands of Formula (5), X¹⁸⁸ can be selected from D and E.

[0492] In IL-2Rγc ligands of Formula (5), (5a), (5b), (5c), (5d), and/or (5e), X¹⁷¹ can be selected from H, K, and R; X¹⁷² can be selected from S, T, and Y; X¹⁷³ can be selected from D, E, F, I, L, M, V, W, and Y; X¹⁷⁴ can be selected from F, I, L, M, V, W, and Y; X⁷⁵ can be selected from D, E, F, I, L, M, V, W, and Y; X¹⁷⁶ can be selected from D, E, H, N, Q, S, T, and Y; X¹⁷⁷ can be selected from D and E; X¹⁷⁸ can be selected from F, H, I, L, M, V, W, and Y; X¹⁷⁹ can be selected from D, E, H, N, Q, S, T, and Y; X¹⁸⁰ can be G; X¹⁸¹ can be V; X¹⁸² can be E; X¹⁸³ can be L; X¹⁸⁴ can be selected from W; X¹⁸⁵ can be selected from F, I, L, M, V, W, and Y; X¹⁸⁶ can be E; X¹⁸⁷ can be selected from an amino acid; and X¹⁸⁸ can be selected from D and E.

[0493] In IL-2Rγc ligands of Formula (5), (5a), (5b), (5c), (5d), and/or (5e), X¹⁷¹ can be selected from H, K, and R; X¹⁷² can be selected from S, T, and Y; X¹⁷³ can be selected from D and E; X¹⁷⁴ can be V; X¹⁷⁵ can be selected from D and E; X¹⁷⁶ can be selected from E and Q; X¹⁷⁷ can be selected from D and E; X¹⁷⁸ can be selected from F, H, W, and Y; X¹⁷⁹ can be selected from D, E, and Q; X¹⁸⁰ can be G; X¹⁸¹ can be V; X¹⁸² can be E; X¹⁸³ can be L; X¹⁸⁴ can be W; X¹⁸⁵ can be selected from F, I, L, M, V, W, Y, H, N, Q, S, and T; X¹⁸⁶ can be E; X¹⁸⁷ can be selected from an amino acid; and X¹⁸⁸ can be selected from D and E.

[0494] In IL-2Rγc ligands of Formula (5), (5a), (5b), (5c), (5d), and/or (5e), X¹⁷¹ can be selected from H, K, and R; X¹⁷² can be selected from S, T, and Y; X¹⁷³ can be selected from F, I, L, M, V, W, and Y; X⁷⁴ can be V; X¹⁷⁵ can be selected from F, I, L, M, V, W, and Y; X¹⁷⁶ can be selected from E and Q; X¹⁷⁷ can be selected from D and E; X¹⁷⁸ can be selected from F, H, W, and Y; X¹⁷⁹ can be selected from D, E, and Q; X¹⁸⁰ can be G; X¹⁸¹ can be V; X¹⁸² can be E; X¹⁸³ can be L; X¹⁸⁴ can be W; X¹⁸⁵ can be selected from F, I, L, M, V, W, Y, H, N, Q, S, and T; X¹⁸⁶ can be E; X¹⁸⁷ can be selected from an amino acid; and X¹⁸⁸ can be selected from D and E.

[0495] In IL-2Rγc ligands of Formula (5), (5a), (5b), (5c), (5d), and/or (5e), X¹⁷¹ can be selected from H, K, and R; X¹⁷² can be selected from S, T, and Y; X¹⁷³ can be selected from D, E, F, I, L, M, V, W, and Y; X¹⁷⁴ can be V; X¹⁷⁵ can be selected from D, E, F, I, L, M, V, W, and Y; X¹⁷⁶ can be selected from D, E, H, N, Q, S, T, and Y; X¹⁷⁶ can be selected from E and Q; X¹⁷⁷ can be selected from D and E; X¹⁷⁸ can be W; X¹⁷⁹ can be selected from D, E, and Q; X¹⁸⁰ can be G; X¹⁸¹ can be V; X¹⁸² can be E; X¹⁸³ can be L; X¹⁸⁴ can be W; X¹⁸⁵ can be selected from F, I, L, M, V, W, Y, H, N, Q, S, and T; X¹⁸⁶ can be E; X¹⁸⁷ can be selected from an amino acid; and X¹⁸⁸ can be selected from D and E.

[0496] An IL-2Rγc ligand can comprise an amino acid sequence selected from any one of SEQ ID NOS: 950-1028.

SEQ ID NO: 950
I E C D T S Y G V Y I C W Q
SEQ ID NO: 951
I E C E E W R G V E L C W Q
SEQ ID NO: 952
P E G R E V V V C R D W Y G V E L C W Q
SEQ ID NO: 953
I W G R T V V E C Q D W E G V E L C W Q
SEQ ID NO: 954
L A L R K E V V C Q E Y Y G V E L C W I
SEQ ID NO: 955
H E A R E V V V C Q D W Y G V E L C W Q
SEQ ID NO: 956
M V N R E V V V C E D W Y G V E L C W Q
SEQ ID NO: 957
T A N Q T V V E C Q V W G G V E L C W Q
SEQ ID NO: 958
V E C Q E W G G V E L C W C
SEQ ID NO: 959
D V E C V D W G G V E L C W H
SEQ ID NO: 960
I V C E E W R G V E L C W L
SEQ ID NO: 961
D F E R S Y V V C Q D W D G V E L C W I
SEQ ID NO: 962
A H S R Q E V V C E E W Y G V E L C W I
SEQ ID NO: 963
S A P E R W V E C E D W Q G V E L C W V
SEQ ID NO: 964
Y S R E L Y V Q C E D W E G V E L C W I
SEQ ID NO: 965
V V C Q D W E G V E L C W Q
SEQ ID NO: 966
D V V C Q N W E G V D L C W H
SEQ ID NO: 967
S A G R Q E V V C Q D W N G V E L C W I
SEQ ID NO: 968
G Q G R E V V V C H D W Y G V E L C W Q
SEQ ID NO: 969
D W R R S V V E C Q D W Y G V E L C W Q
SEQ ID NO: 970
D V V C Q N W D G V D L C W H
SEQ ID NO: 971
T L G R T V V E C Q D W G G V E L C W Q
SEQ ID NO: 972
R L L N S V V E C L D W E G V E L C W Q
SEQ ID NO: 973
I V C E D W R G V E L C W I
SEQ ID NO: 974
V V C Q E W E G V E L C W C
SEQ ID NO: 975
G D R P K E V V C E D W K G V E L C W I
SEQ ID NO: 976
E R P R S F I E C Q E W E G V E L C W L
SEQ ID NO: 977
E G S T T T I E C E E W A G V E L C W L
SEQ ID NO: 978
A N Q N T V V E C Q D W H G V E L C W Q
SEQ ID NO: 979
R S D D E V V V C Q E W E G V E L C W Q
SEQ ID NO: 980
I E C E E W A G V E L C W L
SEQ ID NO: 981
T W N M S E L E C Q D W N G V E I C W H
SEQ ID NO: 982
G N D D S Y I V C E E W K G V E L C W I
SEQ ID NO: 983
F A H H G V V E C Q E W Y G V E L C W Q
SEQ ID NO: 984
L N R S V W I E C E E Y E G V E L C W L
SEQ ID NO: 985
W S K K A E V V C E E W G G V E F C W I
SEQ ID NO: 986
R S N Q T V V E C Q D W E G V E L C W Q
SEQ ID NO: 987
V V C Q E W E G V E L C W Y A G E C M Q
SEQ ID NO: 988
I L C Q E F E G V E L C W L E E S L A E
SEQ ID NO: 989
K S Q V E C Q D W E G V E L C W V V S E
SEQ ID NO: 990
K I T V E C Q D W D G V E L C W P T W I
SEQ ID NO: 991
R P Q I E C Q E W Q G V E L C W T R E E
SEQ ID NO: 992
V S C Q E W D G V E L C W V D G D L A A
SEQ ID NO: 993
I M C Q E W D G V E L C W L E R D K A N
SEQ ID NO: 994
G L E I A C E D W Y G V E L C W L R R A
SEQ ID NO: 995
G Y G V L C Q E W Q G V E L C W P V Q R E A G V
SEQ ID NO: 996
P Y G V V C Q D W A G V E L C W V E N R
SEQ ID NO: 997
K L T V E C Q D W D G V E L C W V G V E
SEQ ID NO: 998
I N C Q T W N G V E L C W V D E G L Y Q
SEQ ID NO: 999
V V C Q E W E G V E L C W V E P P L L P
SEQ ID NO: 1000
R V Q V E C E D W N G V E L C W P V R V
SEQ ID NO: 1001
D R Q V V C E E W D G V E L C W I E E S
SEQ ID NO: 1002
K T T V A C Q D W G G V E L C W V E R V
SEQ ID NO: 1003
R P E V V C Q E W E G V E L C W I S P L
SEQ ID NO: 1004
R L G V E C Q E W E G V D L C W I S A F
SEQ ID NO: 1005
K P V V V C E E W Q G V E L C W L E I Q
SEQ ID NO: 1006
V V C E V F Q G V E L C W C E N E E F T
SEQ ID NO: 1007
T D E V S C Q E W E G V E L C W I E R Q
SEQ ID NO: 1008
P V E V R C Q E W E G V E L C W V V G I
SEQ ID NO: 1009
G P E V V C E E F N R V E L C W V E Y N
SEQ ID NO: 1010
K Y I V E C Q E W G G V E L C W P E M V
SEQ ID NO: 1011
V T C Q E Y E G V E L C W T V G C A Y S
SEQ ID NO: 1012
V V C Q E W E G V E L C W Q T G P G A H A
SEQ ID NO: 1013
I V C E E Y N G V E L C W V E T S V K P
SEQ ID NO: 1014
E Q Q V V C Q E W N G V E L C W I E A G
SEQ ID NO: 1015
Q L G V E C Q N W R G V E L C W V S E I
SEQ ID NO: 1016
T A E V V C Q E W D G V E L C W I E V L
SEQ ID NO: 1017
S P S I V C E E W A G V E L C W V D Y S
SEQ ID NO: 1018
A V C Q D W Y G V E L C W C M Q D I L D
SEQ ID NO: 1019
V E C E E W G G V E L C W L A D E V M W
SEQ ID NO: 1020
H S T V I C Q D W D G V E L C W I E N D
SEQ ID NO: 1021
K K I V V C Q D W G G V E L C W T E D D
SEQ ID NO: 1022
S V E V V C E E W H G V E L C W P V F I
SEQ ID NO: 1023
R W A V S C Q D W Q G I E L C W P E W D
SEQ ID NO: 1024
R T G V E C Q D W H G V E L C W P V W E
SEQ ID NO: 1025
G Y G V V C E D F R G V E L C W L E R K
SEQ ID NO: 1026
R T E V E C E D W E G V E L C W L
SEQ ID NO: 1027
I L C E E W Q G V E L C W L E G G G S
SEQ ID NO: 1028
V G I E C E E W A G V E L C W L

[0497] An IL-2Rγc ligand can comprise an amino acid sequence selected from any one of SEQ ID NOS: 944-1028, wherein the amino acid sequence can be terminated with flanking amino acids such as -G-G-(SEQ ID NO: 9399) on the N-terminus, on the C-terminus, or on both the N- and C-termini.

[0498] An IL-2Rβγc ligand can comprise an amino acid sequence selected from any one of SEQ ID NOS: 944-1028, wherein the amino acid sequence can be terminated with one or more amino acids on the N-terminus, on the C-terminus, or on both the N- and C-termini. For example, an amino acid sequence can include terminal glycines and/or serines. For example, an IL-2Rγc ligand can comprise a -G-G-(SEQ ID NO: 9399) moiety on the N-terminus, on the C-terminus, or on both the N- and C-termini.

[0499] An IL-2Rγc ligand can comprise an amino acid sequence selected from any one of SEQ ID NOS: 944-1028, wherein each amino acid independently comprises one or more of the following conservative substitutions: amino acids having a small hydrophobic side chain comprising alanine (A), glycine (G), proline (P), serine (S), or threonine (T); amino acids having a hydroxyl-containing side chain comprising serine (S), threonine (T), or tyrosine (Y); amino acids having an acidic side chain comprising aspartate (D) or glutamate (E); amino acids having a polar-neutral side chain comprising histidine (H), asparagine (N), glutamine (Q), serine (S), threonine (T), or tyrosine (Y); amino acids having a basic side chain comprising arginine (R), lysine (K), or histidine (H); amino acids having a large hydrophobic side chain comprising isoleucine (I), leucine (L), methionine (M), valine (V), phenylalanine (F), tyrosine (Y), or tryptophan (W); and amino acids having an aromatic side chain comprising phenylalanine (F), histidine (H), tryptophan (W), or tyrosine (Y).

[0500] IL-2Rγc ligands of SEQ ID NOS: 944-1028 bind to the human IL-2Rγc subunit with an IC₅₀ of less than 100 μM.

[0501] An IL-2Rγc ligand can comprise an amino acid sequence having an amino acid similarity greater than 60%, greater than 70%, greater than 75%, greater than 80%, greater than 85%, greater than 90%, or greater than 95% to the amino acid sequence of any one of SEQ ID NOS: 944-1028.

[0502] An IL-2Rγc ligand provided by the present disclosure can comprise a truncated amino acid sequence of any one of SEQ ID NOS: 944-1028.

[0503] An IL-2Rγc ligand provided by the present disclosure can comprise an amino acid sequence selected from any one of SEQ ID NOS: 944-1028, or a truncated amino acid sequence of any one of SEQ ID NOS: 944-1028, wherein the amino acid sequence can independently comprise from 1 to 4 glycines (G) (SEQ ID NO: 9429) on the N-terminus, on the C-terminus, or on both the N- and C-termini.

[0504] An IL-2Rγc ligand provided by the present disclosure can comprise an amino acid sequence selected from any one of SEQ ID NOS: 944-1028, or a truncated amino acid sequence of any one of SEQ ID NOS: 944-1028, wherein the amino acid sequence comprises one or more amino acid substitutions such as from 1 to 5 amino acid substitutions. The amino acid substitutions can comprise conservative amino acid substitutions.

[0505] An IL-2Rγc ligand can comprise an amino acid sequence having an amino acid sequence similarity greater than 60%, greater than 70%, greater than 75%, greater than 80%, greater than 85%, greater than 90%, or greater than 95% to the amino acid sequence of any one of SEQ ID NOS: 944-1028 or to a truncated amino acid sequence of any one of SEQ ID NOS: 944-1028.

[0506] An IL-2Rγc ligand of any one of SEQ ID NOS: 944-1028 can bind to the hIL-2Rγc subunit with an IC₅₀ of less than 10 μM as determined using phage ELISA competition assays.

[0507] An IL-2Rγc ligand of any one of SEQ ID NOS: 944-1028, a truncated IL-2Rγc ligand of any one of SEQ ID NOS: 944-1028, or a substituted IL-2Rγc ligand of any one of SEQ ID NOS: 944-1028 can bind to the hIL-2Rγc subunit with an IC₅₀ of less than 100 μM or less than 10 μM as determined using phage ELISA competition assays.

[0508] An IL-2Rγc ligand can comprise an amino acid sequence selected from any one of IL-2Rγc ligands (GL1)-(GL7) having SEQ ID NOS: 965, 980, 981, 985, 1024, 1026, and 1028. The amino acid sequence of these IL-2Rγc ligands is shown in Table 2.

TABLE 2
IL-2Rγc Ligands.

| | | |
|---|---|---|
| (GL1) | SEQ ID NO: 980 | I E C E E W A G V E L C W L |
| (GL2) | SEQ ID NO: 965 | V V C Q D W E G V E L C W Q |
| (GL3) | SEQ ID NO: 985 | W S K K A E V V C E E W G G V E F C W I |
| (GL4) | SEQ ID NO: 1024 | R T G V E C Q D W H G V E L C W P V W E |
| (GL5) | SEQ ID NO: 1028 | V G I E C E E W A G V E L C W L |
| (GL6) | SEQ ID NO: 981 | T W N M S E L E C Q D W N G V E I C W H |
| (GL7) | SEQ ID NO: 1026 | R T E V E C E D W E G V E L C W L |

[0509] An IL-2Rγc ligand can comprise an amino acid sequence having an amino acid sequence similarity greater than 60%, greater than 70%, greater than 75%, greater than 80%, greater than 85%, greater than 90%, or greater than 95%, to the amino acid sequence of any one of SEQ ID NOS: 965, 980, 981, 985, 1024, 1026, and 1028.

[0510] An IL-2Rγc ligand provided by the present disclosure can comprise a truncated amino acid sequence of any one of SEQ ID NOS: 965, 980, 981, 985, 1024, 1026, and 1028.

[0511] An IL-2Rγc ligand provided by the present disclosure can comprise an amino acid sequence selected from any one of SEQ ID NOS: 965, 980, 981, 985, 1024, 1026, and 1028, or a truncated amino acid sequence of any one of SEQ ID NOS: 965, 980, 981, 985, 1024, 1026, and 1028, wherein the amino acid sequence can independently comprise from 1 to 4 glycines (G) (SEQ ID NO: 9429) on the N-terminus, on the C-terminus, or on both the N- and C-termini.

[0512] An IL-2Rγc ligand provided by the present disclosure can comprise an amino acid sequence selected from any one of SEQ ID NOS: 965, 980, 981, 985, 1024, 1026, and 1028, or a truncated amino acid sequence of any one of SEQ ID NOS: 965, 980, 981, 985, 1024, 1026, and 1028, wherein the amino acid sequence comprises one or more amino acid substitutions such as from 1 to 5 amino acid substitutions. The amino acid substitutions can comprise conservative amino acid substitutions.

[0513] An IL-2Rγc ligand can comprise an amino acid sequence having an amino acid sequence similarity greater than 60%, greater than 70%, greater than 75%, greater than 80%, greater than 85%, greater than 90%, or greater than 95% to the amino acid sequence of any one of SEQ ID NOS: 965, 980, 981, 985, 1024, 1026, and 1028 or to a truncated amino acid sequence of any one of SEQ ID NOS: 965, 980, 981, 985, 1024, 1026, and 1028.

[0514] An IL-2Rγc ligand of any one of SEQ ID NOS: 965, 980, 981, 985, 1024, 1026, and 1028 can bind to the hIL-2Rγc subunit with an IC₅₀ of less than 10 μM as determined using phage ELISA competition assays.

[0515] An IL-2Rγc ligand of any one of SEQ ID NOS: 965, 980, 981, 985, 1024, 1026, and 1028, a truncated IL-2Rγc ligand of any one of SEQ ID NOS: 965, 980, 981, 985, 1024, 1026, and 1028, or a substituted IL-2Rγc ligand of any one of SEQ ID NOS: 965, 980, 981, 985, 1024, 1026, and 1028 can bind to the hIL-2Rγc subunit with an IC₅₀ of less than 100 μM or less than 10 μM as determined using phage ELISA competition assays.

[0516] An Rγc ligand can have any one of SEQ ID NOS: 1032, 1034, 1042, 1044, 1051-1060, and 1601-1613.

SEQ ID NO: 1032
S L L K C Y N A S T C A S V F
SEQ ID NO: 1034
C G M A I G D L C M W T
SEQ ID NO: 1042
R W G D V G D L L M P L
SEQ ID NO: 1044
R S C Y Y K R P R L W C S E
SEQ ID NO: 1051
D C S M W E G V E L C W G G R R
SEQ ID NO: 1052
G G V V C Q D W E G V E L C W Q G G R R
SEQ ID NO: 1053
G G V M C E R W Q G V E L C W L G G
SEQ ID NO: 1054
G G R T G V E C Q D W H G V E L C W P V W E G G
SEQ ID NO: 1055
G G V G I E C E E W A G V E L C W L G G
SEQ ID NO: 1056
G G T W N M S E L E C Q D W N G V E I C W H G G
SEQ ID NO: 1057
G G R T E V E C E D W E G V E L C W L G G
SEQ ID NO: 1058
G G W S K K A E V V C E E W G G V E F C W I G G
SEQ ID NO: 1059
W S K K A E V V C E E W G G V E F C W I
SEQ ID NO: 1060
Y S R E L Y V Q C E D W E G V E L C W I
SEQ ID NO: 1601
G G D C S M W E G V E L C W G G
SEQ ID NO: 1602
G G V M C E R W Q G V E L C W L G G
SEQ ID NO: 1603
G G V G I E C E E W A G V E L C W L G G
SEQ ID NO: 1604
G G T W N M S E L E C Q D W N G V E I C W H G G
SEQ ID NO: 1605
G G R T E V E C E D W E G V E L C W L G G
SEQ ID NO: 1606
G G R T G V E C Q D W H G V E L C W P V W E G G
SEQ ID NO: 1607
G G V V C Q D W E G V Abu L C W Q G G
SEQ ID NO: 1608
G G V V C Q D W E G V Alb L C W Q G G
SEQ ID NO: 1609
G G V V C Q D W E G V DA L C W Q G G
SEQ ID NO: 1610
G G V V C Q D W E G V S L C W Q G G
SEQ ID NO: 1611
G G V V C Q D W E G V G L C W Q G G
SEQ ID NO: 1612
G G V V C Q D W E G V E L C W Q P P A
SEQ ID NO: 1613
G G V V C Q D W E G V E L C W Q G P P A

[0517] An Rγc ligand provided by the present disclosure can comprise a truncated amino acid sequence of any one of SEQ ID NOS: 1032, 1034, 1042, 1044, 1051-1060, and 1601-1613.

[0518] An Rγc ligand provided by the present disclosure can comprise an amino acid sequence selected from any one of SEQ ID NOS: 1032, 1034, 1042, 1044, 1051-1060, and 1601-1613, or a truncated amino acid sequence of any one of SEQ ID NOS: 1032, 1034, 1042, 1044, 1051-1060, and 1601-1613, wherein the amino acid sequence can independently comprise from 1 to 4 glycines (G) (SEQ ID NO: 9429) on the N-terminus, on the C-terminus, or on both the N- and C-termini.

[0519] An Rγc ligand provided by the present disclosure can comprise an amino acid sequence selected from any one of SEQ ID NOS: 1032, 1034, 1042, 1044, 1051-1060, and 1601-1613, or a truncated amino acid sequence of any one of SEQ ID NOS: 1032, 1034, 1042, 1044, 1051-1060, and 1601-1613, wherein the amino acid sequence comprises one or more amino acid substitutions such as from 1 to 5 amino acid substitutions. The amino acid substitutions can comprise conservative amino acid substitutions.

[0520] An Rγc ligand can comprise an amino acid sequence having an amino acid sequence similarity greater than 60%, greater than 70%, greater than 75%, greater than 80%, greater than 85%, greater than 90%, or greater than 95% to the amino acid sequence of any one of SEQ ID NOS: 1032, 1034, 1042, 1044, 1051-1060, and 1601-1613 or to a truncated amino acid sequence of any one of SEQ ID NOS: 1032, 1034, 1042, 1044, 1051-1060, and 1601-1613.

[0521] An Rγc ligand of any one of SEQ ID NOS: 1032, 1034, 1042, 1044, 1051-1060, and 1601-1613, a truncated Rγc ligand of any one of SEQ ID NOS: 1032, 1034, 1042, 1044, 1051-1060, and 1601-1613, or a substituted Rγc ligand of any one of SEQ ID NOS: 1032, 1034, 1042, 1044, 1051-1060, and 1601-1613 bind to the hRγc subunit with an IC₅₀ of less than 100 μM or less than 10 μM as determined using phage ELISA competition assays.

[0522] An Rγc ligand of any one of SEQ ID NOS: 1601-1613 binds to the hRγc subunit with an IC₅₀ of less than 100 μM.

[0523] Certain IL-2Rγc ligands provided by the present disclosure can bind to a specific binding site on the IL-2Rγc subunit that is different than the IL-2Rγc binding site on the IL-2Rγc subunit to which IL-2 binds.

[0524] These IL-2Rγc ligands do not compete for binding to the specific IL-2Rγc binding site with IL-2, have no detectable binding to the IL-2Rβ subunit, and bind to the IL-2Rγc subunit with an IC₅₀ of less than 10 μM.

[0525] The specific binding site on the IL-2Rγc subunit can be characterized by at least the following properties: (1) a group of IL-2Rγc ligands bind to the specific binding site on the hIL-2Rγc subunit with an IC₅₀ of less than 10 μM; (2) IL-2Rγc ligands within the group competitively bind to the specific binding site on the IL-2Rγc subunit with other IL-2Rγc ligands within the group; and (3) IL-2Rγc ligands within the group do not compete for binding to the specific binding site with an IL-2Rγc ligand having the amino acid sequence of SEQ ID NO: 1032.

[0526] An IL-2Rβ ligand having the amino acid sequence of SEQ ID NO: 58 does not compete for binding to the binding site with the group of IL-2Rγc ligands.

[0527] The group of IL-2Rγc ligands comprises IL-2Rγc ligands having an amino acid sequence of SEQ ID NOS: 198, 202, 224, 236, 248, and 266.

[0528] IL-2Rγc ligands within the group of IL-2Rγc ligands bind to the IL-2Rγc subunit with an IC₅₀ of less than 100 μM and bind to the IL-2Rβ subunit with an IC₅₀ of greater than 100 μM.

[0529] The specific binding site of the IL-2Rβ subunit for these IL-2Rγc ligands can be characterized using competitive binding assays as described, for example, in Examples 24-27.

[0530] An IL-2Rγc ligand provided by the present disclosure can comprise a pH-biased IL-2Rγc ligand.

[0531] pH-Biased IL-2Rγc ligands bind to the IL-2Rγc subunit at pH 6 with an IC₅₀ that is less than the IC₅₀ for binding of the same IL-2Rγc ligand to the IL-2Rγc subunit at pH 7.5. The pH-biased binding affinity can be determined as described in Examples 24-27.

[0532] A pH-biased IL-2Rγc ligand can bind to the human IL-2Rγc subunit at pH 6 with an IC₅₀ that is at least at least 10% less than the IC₅₀ for binding to the human IL-2Rγc subunit at pH 7.5, at least 25% less, at least 50% less, at least 100% less, or at least 200% less than the IC₅₀ for binding to the human IL-2Rγc subunit at pH 7.5.

[0533] A pH-biased IL-2Rγc ligand can comprise, for example, from 5 to 30 amino acids.

[0534] A pH-biased IL-2Rγc ligand can bind to the human IL-2Rγc subunit at pH 6.0 with an IC₅₀ from 1 pM to 100 μM and can bind to the human IL-2Rγc subunit with an IC₅₀ greater than 100 μM at pH 7.5.

[0535] A pH-biased IL-2Rγc ligand can bind to the human IL-2Rγc subunit at pH 6.0 with an IC₅₀ from 0.1 μM to 50 μM and bind to the human IL-2Rγc subunit with an IC₅₀ greater than 100 μM at pH 7.5.

[0536] A pH-biased IL-2Rγc ligand can bind to the human IL-2Rγc subunit at pH 6.0 with an IC₅₀ of less than 100 μM.

[0537] A pH-biased IL-2Rγc ligand can bind to each of the human IL-2Rγc subunit and to the human IL-2Rγc subunit with an IC₅₀ of less than 100 μM and a bind to the human IL-2Rγc subunit with an IC₅₀ greater than 100 μM at pH 7.5.

[0538] A pH-biased IL-2Rγc ligand can bind to a mammalian IL-2Rγc subunit at pH 6.0 with an IC₅₀ of less than 100 μM and bind to the human IL-2Rγc subunit with an IC₅₀ greater than 100 μM at pH 7.5.

[0539] pH-Biased IL-2Rγc ligands can be identified using the methods described in Examples 23 and 24.

[0540] An IL-2Rβ ligand, an IL-2Rγc ligand, and an IL-2Rβγc ligand may not comprise any flanking amino acids bound to the N-terminus and/or to the C-terminus of the ligand.

[0541] IL-2Rβ ligands and IL-2Rγc ligands can comprise one or more flanking amino acids bound to the N-terminus and/or to the C-terminus of the ligand.

[0542] The flanking amino acids can separate the portion of the ligand that interacts with IL-2R from other portions of a ligand, an IL-2Rβγc ligand, and/or a ligand construct.

[0543] A ligand can comprise flanking amino acids such as, for example, from 1 to 20 amino acids, from 1 to 10 amino acids, such as from 1 to 8 amino acids, from 2 to 6 amino acids, or from 2 to 4 amino acids bound to the N-terminus and/or the C-terminus of the ligand.

[0544] Flanking amino acids can comprise any suitable naturally occurring or non-naturally occurring amino acids.

[0545] Flanking amino acids can be selected from serine and flexible amino acids such as serine.

[0546] A ligand can comprise flanking amino acids such as, for example, terminal glycine groups on the N-terminus and/or the C-terminus of the respective ligand. For example, a ligand can comprise flanking amino acids having an amino acid sequence of any one of SEQ ID NOS: 9380-9407 and 9420-9428. For example, an IL-2Rβ ligand, an IL-2Rγc ligand, or an IL-2Rβγc ligand can independently comprise flanking amino acids such as 1, 2 or 3 terminal glycines.

[0547] An IL-2Rβ ligand, an IL-2Rγc ligand, and an IL-2Rβγc ligand can comprise, for example, from 1 to 20 amino acids, from 1 to 10 amino acids, such as from 1 to 8 amino acids, from 2 to 6 amino acids, or from 2 to 4 amino acids bound to the N-terminus and/or the C-terminus of the IL-2Rβ and IL-2Rγc ligand.

[0548] Flanking amino acids can comprise any suitable naturally occurring or non-naturally occurring amino acids.

[0549] Flanking amino acids can be selected from flexible amino acids such as glycine and serine. An IL-2Rβ ligand and/or an IL-2Rγc ligand can comprise, for example, terminal glycine groups on the N-terminus and/or the C-terminus of the respective ligand. For example, an IL-2Rβ and an IL-2Rγc ligand can comprise (G)ₙ glycine groups (SEQ ID. NO: 9380) where n is from 1 to 20. For example, each of an IL-2Rβ ligand and an IL-2Rγc ligand can independently comprise 1, 2 or 3 terminal glycine groups. For example, a ligand having SEQ ID NO: 878, having the amino acid sequence -W-H-P-C-W-I-A-Q-L-G-E-L-C-D-L-E- can independently include, for example, one, two, or three glycines on both the N-terminus and the C-terminus such that the ligand can have the amino acid sequence -G-W-H-P-C-W-I-A-Q-L-G-E-L-C-D-L-E-G-(SEQ ID NO: 1209), -G-G-W-H-P-C-W-I-A-Q-L-G-E-L-C-D-L-E-G-G-(SEQ ID NO: 1210), or -G-G-G-W-H-P-C-W-I-A-Q-L-G-E-L-C-D-L-E-G-G-G-(SEQ ID NO: 1211), respectively.

[0550] An IL-2Rβ ligand, an IL-2Rγc ligand, and an IL-2Rβγc ligand provided by the present disclosure can comprise, for example, an amino acid substitution such as from 1 to 10 amino acid substitutions, from 1 to 8, from 1 to 6, from 1 to 4, such as 1, 2, 3, 4, 5, 6, 7, 8, 9, or 10 amino acid substitutions. An amino acid substitution can be a conservative amino acid substitution.

[0551] A ligand can comprise a truncated amino acid sequence.

[0552] A truncated amino acid sequence refers to an amino acid sequence which does not include one or more of the terminal amino acids. For example, in a truncated peptide one or more amino acids is removed from the N-terminus, the C-terminus or both the N-terminus and the C-terminus. Removing one or more amino acids from the N-terminus and/or the C-terminus of an amino acid sequence provided by the present disclosure can result in improved properties. Thus, ligands such as IL-2Rβ ligands and IL-2Rγc ligands provided by the present disclosure include truncated IL-2Rβ ligands and truncated Rye ligands.

[0553] Examples of truncated IL-2Rβ ligands based on SEQ ID NO: 9301 include ligands having an amino acid sequence of any one of SEQ ID NOS: 9301-9314, 865, and 612.

```
SEQ ID NO: 9301
G G W Y P C W M A Q L G E L C D L D G G
SEQ ID NO: 9302
    G W Y P C W M A Q L G E L C D L D G G
SEQ ID NO: 9303
        W Y P C W M A Q L G E L C D L D G G
SEQ ID NO: 9304
            Y P C W M A Q L G E L C D L D G G
SEQ ID NO: 9305
                P C W M A Q L G E L C D L D G G
SEQ ID NO: 9306
                    C W M A Q L G E L C D L D G G
SEQ ID NO: 9307
G G W Y P C W M A Q L G E L C D L D G
SEQ ID NO: 9308
G G W Y P C W M A Q L G E L C D L D
SEQ ID NO: 9309
G G W Y P C W M A Q L G E L C D L
SEQ ID NO: 9310
G G W Y P C W M A Q L G E L C D
SEQ ID NO: 9311
G G W Y P C W M A Q L G E L C
SEQ ID NO: 9312
    G W Y P C W M A Q L G E L C D L D G
SEQ ID NO: 9313
        W Y P C W M A Q L G E L C D L D G
SEQ ID NO: 865
        W Y P C W M A Q L G E L C D L D
SEQ ID NO: 612
            Y P C W M A Q L G E L C D L
SEQ ID NO: 9314
                P C W M A Q L G E
```

[0554] Examples of truncated IL-2Rγc ligands based on SEQ ID NO: 9340 include ligands having an amino acid sequence of any one of SEQ ID NOS: 9340-9353 and 965.

```
SEQ ID NO: 9340
G G V V C Q D W E G V E L C W Q G G
SEQ ID NO: 9341
    G V V C Q D W E G V E L C W Q G G
SEQ ID NO: 9342
        V V C Q D W E G V E L C W Q G G
SEQ ID NO: 9343
            V C Q D W E G V E L C W Q G G
SEQ ID NO: 9344
                C Q D W E G V E L C W Q G G
SEQ ID NO: 9345
G G V V C Q D W E G V E L C W Q G
SEQ ID NO: 9346
G G V V C Q D W E G V E L C W Q
SEQ ID NO: 9347
G G V V C Q D W E G V E L C W
SEQ ID NO: 9348
G G V V C Q D W E G V E L C
SEQ ID NO: 9349
    G V V C Q D W E G V E L C W Q G
SEQ ID NO: 965
        V V C Q D W E G V E L C W Q
SEQ ID NO: 9350
            V C Q D W E G V E L C W Q
SEQ ID NO: 9351
            V C Q D W E G V E L C W
SEQ ID NO: 9352
                C Q D W E G V E L C W
SEQ ID NO: 9353
                C Q D W E G V E L C
```

[0555] An IL-2Rβ ligand provided by the present disclosure can have greater than 60%, greater than 70%, greater than 75%, greater than 80%, greater than 85%, greater than 90%, or greater than 95% sequence similarity to any one of SEQ ID NOS: 805-903. An IL-2Rβ ligand provided by the present disclosure can have greater than 60%, greater than 70%, greater than 75%, greater than 80%, greater than 85%, greater than 90%, or greater than 95% sequence similarity to SEQ ID NO: 865.

[0556] An IL-2Rγc ligand provided by the present disclosure can have greater than 60%, greater than 70%, greater than 75%, greater than 80%, greater than 85%, greater than 90%, or greater than 95% sequence similarity to any one of SEQ ID NOS: 944-1028. An IL-2Rγc ligand provided by the present disclosure can have greater than 60%, greater than 70%, greater than 75%, greater than 80%, greater than 85%, greater than 90%, or greater than 95% sequence similarity to SEQ ID NO: 965.

[0557] An IL-2Rβ ligand, an IL-2Rγc ligand, and an IL-2Rβγc ligand provided by the present disclosure can comprise an acetyl terminal group on the N-terminus and a carboxamide group on the C-terminus.

[0558] An IL-2Rβγc ligand can comprise an IL-2Rβ ligand and an IL-2Rγc ligand bound to an IL-2Rβγc ligand linker.

[0559] Each of an IL-2Rβ ligand and an IL-2Rγc ligand can independently be covalently bound to an IL-2Rβγc ligand linker through the N-terminus or the C-terminus of the respective ligand. For example, an IL-2Rβ ligand can be bound to the IL-2Rβγc ligand linker through the N-terminus and an IL-2Rγc ligand can be bound to an IL-2Rβγc ligand linker through the N-terminus; an IL-2Rβ ligand can be bound to an IL-2Rβγc ligand linker through the N-terminus and an IL-2Rγc ligand can be bound to the IL-2Rβγc ligand linker through the C-terminus; an IL-2Rβ ligand can be bound to the IL-2Rβγc ligand linker through the C-terminus and an IL-2Rγc ligand can be bound to the IL-2Rβγc ligand linker through the N-terminus; or an IL-2Rβ ligand can be bound to the IL-2Rβγc ligand linker through the C-terminus and an IL-2Rγc ligand can be bound to the IL-2Rβγc linker through the C-terminus.

[0560] Examples of IL-2Rβγc ligands having various orientations of the IL-2Rβ and IL-2Rγc ligands are shown in FIG. 1. As shown in FIG. 1, IL-2Rβγc ligands having various C/N orientations of the IL-2Rβ ligand and the IL-2Rγc ligand can be synthesized using click chemistry. The triazole linkage is a schematic representation of an IL-2Rγc ligand linker, which can comprise various chemical moieties and can have various lengths and properties. Examples of certain IL-2Rβγc ligand linkers are shown in Table 3.

[0561] An IL-2Rβγc ligand linker can be configured to facilitate binding of an IL-2Rβγc ligand to the IL-2Rβ subunit and to the IL-2Rγc subunit of IL-2R. For example, an IL-2Rβγc ligand linker can be configured to facilitate activation of IL-2R by the IL-2Rβγc ligand. For example, an IL-2Rβγc ligand can be configured to induce IL-2R-mediated STAT5 phosphorylation in TF-1β cells and in NK-92 cells.

[0562] An IL-2Rβγc ligand linker can have a length, for example, from 2 Å to 100 Å, from 2 Å to 80 Å, from 2 Å to 60 Å, from 2 Å to 40 Å, from 2 Å to 20 Å, from 4 Å to 18 Å, from 6 Å to 16 Å, or from 8 Å to 14 Å.

[0563] A ligand linker can have a length, for example, less than 100 Å, less than 80 Å, less than 60 Å, less than 40 Å, less than 20 Å, less than 15 Å, or less than 10 Å.

[0564] An IL-2Rβγc ligand linker can comprise a backbone having, for example, from 2 to 50 bonds, from 2 to 45 bonds, from 2 to 40 bonds, from 2 to 35 bonds, from 2 to 30 bonds, from 2 to 25 bonds, from 2 to 20 bonds, from 4 to 18 bonds, from 6 to 16 bonds, or from 8 to 14 bonds. An IL-2Rβγc ligand linker can comprise a backbone having, for example, less than 50 bonds, less than 40 bonds, less than 30 bonds, less than 20 bonds, or less than 10 bonds.

[0565] An IL-2Rβγc ligand linker provided by the present disclosure can comprise a peptidyl IL-2Rβγc ligand or a chemical IL-2Rβγc linker.

[0566] An IL-2Rβγc ligand linker provided by the present disclosure can comprise a peptidyl IL-2Rβγc ligand linker.

[0567] A peptidyl ligand linker can comprise, for example, from 2 to 100 amino acids, from 2 to 80 amino acids, from 2 to 60 amino acids, from 2 to 40 amino acids, from 2 to 20 amino acids, from 5 to 10 amino acids, or from 2 to 5 amino acids. A peptidyl ligand linker can comprise, for example, less than 100 amino acids, less than 80 amino acids, less than 40 amino acids, less than 20 amino acids, less than 15 amino acids, less than 10 amino acids, or less than 5 amino acids. Amino acids forming a peptidyl IL-2Rβγc ligand linker can comprise naturally occurring amino acids and/or non-naturally occurring amino acids.

[0568] A peptidyl IL-2Rβγc ligand linker can comprise, for example, flexible amino acids such as glycine, serine, and/or threonine. Flexible linkers can include small, non-polar amino acids such as glycine or polar amino acids such as serine or threonine. The small size of these amino acids provides flexibility and allows for mobility of the connecting functional domains. Incorporation of serine or threonine can maintain the stability of the linker in aqueous solutions by forming hydrogen bonds with water molecules, and thereby reduces unfavorable interactions between the linker and protein moieties. Amino acids such as lysine and glutamic acid can be included to improve solubility. The length of a peptidyl IL-2Rβγc linker can be selected to provide a suitable separation between the IL-2Rβ and IL-2Rγc ligands to favor a desired interaction with IL-2R such as enhancing agonist activity. Examples of flexible linkers include peptides having an amino acid sequence of any one of SEQ ID NOS: 9380-9407.

[0569] A peptidyl IL-2Rβγc ligand linker can be a rigid linker. Rigid linkers can be proline rich and can include other amino acids such as alanine, lysine, and/or glutamic acid. Examples of rigid peptidyl ligand linkers include peptides having an amino acid sequence of any one of SEQ ID NOS: 9420-9428.

[0570] IL-2Rβγc ligands comprising a peptidyl IL-2Rβγc ligand linker can be synthesized using non-recombinant methods such as using the solid phase synthesis as described in Example 1 or can be synthesized using recombinant DNA technology.

[0571] An IL-2Rβγc ligand linker can comprise a synthetic chemical IL-2Rβγc ligand linker. A synthetic chemical IL-2Rβγc ligand linker refers to a linker that is synthesized using chemical methods and can include amino acids or may not include amino acids. A synthetic chemical IL-2Rβγc ligand linker can comprise a triazole moiety.

[0572] A synthetic chemical ligand linker can have the structure, for example, of Formula (L2)-(L13) as shown in Table 3.

TABLE 3
Examples of IL-2Rβγc synthetic chemical linkers.

| Formula | |
|---|---|
| No. | Chemical Structure |
| (L1) | [chemical structure] |
| (L2) | [chemical structure] |
| (L3) | [chemical structure] |
| (L4) | [chemical structure] |
| (L5) | [chemical structure] |
| (L6) | [chemical structure] |
| (L7) | [chemical structure] |
| (L8) | [chemical structure] |
| (L9) | [chemical structure] |
| (L10) | [chemical structure] |
| (L11) | [chemical structure] |
| (L12) | [chemical structure] |
| (L13) | [chemical structure] |
| (L14) | [chemical structure] |
| (L15) | [chemical structure] |
| (L16) | [chemical structure] |
| (L17) | [chemical structure] |

[0573] In IL-2Rγc ligand linkers (L2), (L4)-(L7), (L12) and L13), m and/or n can be an integer, for example, from 1 to 10.

[0574] A chemical IL-2Rβγc ligand linker can be synthesized using click chemistry to provide IL-2Rβγc ligands having various C/N orientations of the IL-2Rβ and IL-2Rγc ligands. C/N orientation refers to the terminus of the IL-2Rβ and IL-2Rγc which are bonded to the IL-2Rβγc ligand linker. For example, for an IL-2Rβγc ligand having a C/N orientation, the C-terminus of the IL-2Rβ ligand is bonded to the IL-2Rβγc ligand linker, and the N-terminus of the IL-2Rγc ligand is bonded to the IL-2Rβγc ligand linker. As another example, for an IL-2Rβγc ligand having an N/C orientation, the N-terminus of the IL-2Rβ ligand is bonded to the IL-2Rβγc ligand linker, and the C-terminus of the IL-2Rγc ligand is bonded to the IL-2Rβγc ligand linker.

[0575] An example of a method for preparing an IL-2Rβγc ligand having a synthetic ligand linker is described in Example 2.

[0576] IL-2Rβ and IL-2Rγc ligands can be prepared using standard solid phase peptide synthesis and Fmoc-protected amino acids. A swollen resin can be treated with either an activated solution of Fmoc-propargyl glycine or 2-(Fmoc-NH)-azido-pentanoic acid to provide the corresponding Fmoc-protected resin. The alkyne-containing moiety and the azide-containing moiety can be configured to have, for example, a desired length, rigidity/flexibility, polarity, lipophilicity, and/or steric property. The protected resin can be subjected to repeated cycles of Fmoc-amino acid couplings with HATU activation and Fmoc removal to synthesize the respective IL-2Rβ ligand or IL-2Rγc ligand. After Fmoc removal from the final amino acid of the IL-2Rβ or IL-2Rγc ligand and acylation of terminal amine groups, the ligands can be cleaved from the resin and purified.

[0577] The alkyne-containing moiety and azide-containing moiety can be reacted, for example, in the presence of CuSO₄ and a metal chelator to provide an IL-2Rβγc ligand comprising a synthetic chemical IL-2Rβγc ligand linker. The reacted alkyne-containing moiety and azide-containing moiety form the chemical ligand linker. For example, referring to Tables 3-5, an alkyne-containing moiety of Formula (AL) in Table 4 can be reacted with an azide-containing moiety of Formula (AZ) in Table 5 to provide a chemical IL-2Rβγc ligand linker of Formula (L) in Table 3.

[0578] Using this click-chemistry method, IL-2Rβγc ligands comprising IL-2Rβ and IL-2Rγc ligands having differing N-terminal and C-terminal orientations and different ligand linker lengths can be synthesized.

[0579] Examples of alkyne-containing moieties are provided in Table 4 and examples of azide-containing moieties are provided in Table 5.

TABLE 4
Examples of alkyne-containing moieties.

| Formula | |
|---|---|
| No. | Chemical Structure |
| (AL1) | [chemical structure] |
| (AL2) | [chemical structure] |
| (AL3) | [chemical structure] |
| (AL4) | [chemical structure] |
| (AL5) | [chemical structure] |
| (AL6) | [chemical structure] |
| (AL7) | [chemical structure] |
| (AL8) | [chemical structure] |
| (AL9) | [chemical structure] |

TABLE 5
Examples of azide-containing moieties,

| Formula No. | Chemical Structure |
|---|---|
| (AZ1) | [chemical structure] |
| (AZ2) | [chemical structure] |
| (AZ3) | [chemical structure] |
| (AZ4) | [chemical structure] |
| (AZ5) | [chemical structure] |

[0580] An IL-2Rβγc ligand can comprise N- and/or C-terminal modifications to prevent or minimize degradation by aminopeptidases and carboxypeptidases. Examples of terminal groups include an acetyl group on the N-terminus and a carboxamide group on the C-terminus.

[0581] IL-2Rβγc ligands provided by the present disclosure can comprise, for example, a moiety having the structure of Formula (6):

-BL-L-GL- (6)
[0582] where BL comprises an IL-2Rβ ligand, L comprises an IL-2Rβγc ligand linker, and GL comprises an IL-2Rγc ligand.

[0583] A moiety of Formula (6) can be terminated in small chemical moieties and can have a molecular weight, for example, less than 12,000 Da, less than 11,000 Da, less than 10,000 Da, less than 9,000 Da, less than 8,000 Da, less than 7,000 Da, or less than 6,000 Da. An IL-2Rβγc ligand can have a molecular weight, for example, from 6,000 Da to 12,000 Da, from 7,000 Da to 11,000 Da, or from 8,000 Da to 10,000 Da.

[0584] In IL-2Rβγc ligands of Formula (6), BL can comprise an IL-2Rβ ligand having an amino acid sequence of any one of SEQ ID NOS: 805-903, or having an amino acid sequence having greater than 60%, greater than 70%, greater than 80%, greater than 85%, greater than 90%, or greater than 95% sequence similarity to any one SEQ ID NOS: 805-903; GL can comprise an IL-2Rγc ligand having an amino acid sequence of SEQ ID NOS: 944-1028, or having an amino acid sequence having greater than 60%, greater than 70%, greater than 80%, greater than 85%, greater than 90%, or greater than 95% sequence similarity to any one of SEQ ID NOS: 944-1028; and L can comprise a peptidyl IL-2Rβγc ligand linker or a chemical IL-2Rβγc ligand linker. Examples of suitable peptidyl IL-2Rβγc ligand linkers are disclosed in FIGS. 21A-21C, and examples of suitable chemical ligand linkers are disclosed in Table 3.

[0585] In IL-2Rβγc ligands of Formula (6), either the N-terminus or the C-terminus of the IL-2Rβ ligand can be bound to the IL-2Rβγc ligand linker and either the N-terminus or the C-terminus of IL-2Rγc ligand can be bound to the IL-2Rβγc ligand linker. For example, the C-terminus of the IL-2Rβ ligand (BL) can be bound to the linker (L) and the N-terminus of the IL-2Rγc ligand (GL) can be bound to the linker (L).

[0586] In IL-2Rβγc ligands of Formula (6) each of the IL-2Rβ ligand and the IL-2Rγc ligand can independently comprise one or more flanking amino acids bound to the N-terminus and/or the C-terminus of the ligand. For example, both the N-terminus and the C-terminus of the IL-2Rβ ligand can comprise (G)ₙ (SEQ ID NO: 9380) and both the N-terminus and the C-terminus of the IL-2Rγc ligand can comprise-(G)ₙ (SEQ ID NO: 9380). The flanking amino acids can be bound to the IL-2Rβγc ligand linker.

[0587] IL-2Rβγc ligands of Formula (6) can comprise an acetyl terminal group on the N-terminus and a carboxamide group on the C-terminus.

[0588] An IL-2Rβγc ligand provided by the present disclosure can comprise the structure of Formula (6a):

-(A)ₙ-BL-(A)ₙ-L-(A)ₙ-GL-(A)ₙ- (6a)

[0589] where,
[0590] each n is independently an integer from 0 to 10;
[0591] BL is an IL-2Rβ ligand comprising:
   [0592] an amino acid sequence selected from any one of SEQ ID NOS: 805-903;
   [0593] an amino acid sequence having greater than 60%, greater than 70%, greater than 80%, greater than 85%, or greater than 90% sequence identity to any one of SEQ ID NOS: 805-903;
   [0594] a truncated amino acid sequence of any one of SEQ ID NOS: 805-903; or
   [0595] a combination of any of the foregoing;
[0596] GL is an IL-2Rγc ligand comprising:
   [0597] an amino acid sequence selected from any one of SEQ ID NOS: 944-1028;
   [0598] an amino acid sequence having greater than 60%, greater than 70%, greater than 80%, greater than 85%, or greater than 90% sequence identity to any one of SEQ ID NOS: 944-1028;
   [0599] a truncated amino acid sequence of any one of SEQ ID NOS: 944-1028; or
   [0600] a combination of any of the foregoing;
[0601] each A is independently selected from an amino acid; and
[0602] L is a peptidyl ligand linker comprising from 1 to 50 amino acids.

[0603] In IL-2Rβγc ligands of Formula (6a), the C-terminus of the IL-2Rβ ligand can be bound to the peptidyl ligand linker, and the N-terminus of the IL-2Rγc ligand can be bound to the peptidyl ligand linker.

[0604] In IL-2Rβγc ligands of Formula (6a) each n can independently be selected from, for example, an integer from 0 to 8, from 0 to 6, from 0 to 4, or from 0 to 2. For example, n can be 0, 1, 2, or 3. (A)˜represents flanking amino acids.

[0605] Each A can independently be selected from a naturally occurring or non-naturally occurring amino acid. Each A can be independently be selected from a flexible amino acid such as glycine and serine. Each A can be glycine.

[0606] L can comprise, for example, from 1 to 40 amino acids, from 1 to 30 amino acids, from 1 to 20 amino acids, from 1 to 10 amino acids, or from 1 to 5 amino acids. Lₐ can be selected from a peptidyl ligand linker. For example, L can be a peptidyl ligand linker having an amino acid sequence of any one of SEQ ID NOS: 9380-9407 and 9420-9428.

[0607] Examples of IL-2Rβγc ligands having a chemical IL-2Rβγc ligand linker are listed in FIGS. 19A-19C.

[0608] Examples of IL-2Rβγc ligands having a peptidyl IL-2Rβγc ligand linker are listed in FIGS. 21A-21C.

[0609] IL-2Rβγc ligands provided by the present disclosure can comprise disulfide bonds. IL-2Rβ ligands and IL-2Rγc ligands can comprise at least two cysteines. The at least two cysteines of an IL-2Rβ ligand can be bound through disulfide bonds and each of the at least two cysteines of an IL-2Rγc ligand can be bound through a disulfide bond.

[0610] In an IL-2Rβγc ligand, two cysteines of the IL-2Rβ ligand can be bound together through a disulfide bond and/or two cysteines of the IL-2Rγc ligand can be bound together through a disulfide bond.

[0611] In an IL-2Rβγc ligand a cysteine of an IL-2Rβ ligand can be bound to a cysteine of the IL-2Rγc ligand through a disulfide bond, or each of the two cysteines of an IL-2Rβ ligand can be bound to a cysteine of the IL-2Rγc ligand. For example, in an IL-2Rβγc ligand having the structure of Formula (7):

-X-C¹-X-C²-X-L-Y-C³-Y-C⁴-Y- (7)
[0612] where -X-C¹-X-C²-X-represents an amino acid sequence of an IL-2Rβ ligand having two cysteines such as any one of SEQ ID NOS: 805-903, and where each X is independently one or more amino acids, -Y-C³-Y-C⁴-Y- represents an amino acid sequence of an IL-2Rγc ligand having two cysteines such as any one of SEQ ID NOS: 944-1028 and where each Y is independently one or more amino acids, and -L- is an IL-2Rβγc ligand linker coupling the IL-2Rβ ligand and the IL-2Rγc ligand.

[0613] In an IL-2Rβγc ligand of Formula (7), C¹ can be bound to C² and C³ can be bound to C⁴ through disulfide bonds; C¹ can be bound to C³ and C² can be bound to C⁴ through disulfide bonds, or C1 can be bound to C⁴ and C² can be bound to C³ through disulfide bonds.

[0614] An IL-2Rβγc ligand can comprise an IL-2Rβ ligand provided by the present disclosure such as an amino acid sequence selected from any one of SEQ ID NOS: 805-903, 911-930, 2575-2655, 2661-2891, 2900-2926, and 2929-2939, a substituted amino acid sequence of an IL-2Rβ ligand of an IL-2Rβ ligand provided by the present disclosure, an amino acid sequence of an IL-2Rβ ligand provided by the present disclosure having from 1 to 5 flanking glycines (SEQ ID NO: 9430) on the N-terminus and/or the C-terminus, an amino acid sequence having greater than 60% sequence similarity to an IL-2Rβ ligand provided by the present disclosure, or a combination of any of the foregoing; and a Rγc ligand provided by the present disclosure such as an amino acid sequence selected from any one of SEQ ID NOS: 944-1028, 1032-1060, and 1601-1613, a substituted amino acid sequence of an IL-2Rγc ligand provided by the present disclosure, a truncated amino acid sequence of an IL-2Rγc ligand provided by the present disclosure, an amino acid sequence an IL-2Rγc ligand provided by the present disclosure having from 1 to 5 flanking glycines (SEQ ID NO: 9430) on the N-terminus and/or the C-terminus, an amino acid sequence having greater than 60% sequence similarity to an IL-2Rγc ligand provided by the present disclosure, or a combination of any of the foregoing.

[0615] An IL-2Rβγc ligand provided by the present disclosure can comprise an IL-2Rβ ligand having an amino acid sequence of any one of SEQ ID Nos: 865 and 9301-9314. or an amino acid sequence having greater than 60%, greater than 70%, greater than 75%, greater than 80%, greater than 85%, greater than 90%, or greater than 95% sequence similarity to any one of SEQ ID Nos: 865 and 9301-9314: and an IL-2Rγc ligand having an amino acid sequence of any one of SEQ ID NOS: 965 and 9340-9353, or an amino acid sequence having greater than 60%, greater than 70%, greater than 75%, greater than 80%, greater than 85%, greater than 90%, or greater than 95% sequence similarity to any one of SEQ ID Nos: 865 and 9301-9314.

[0616] IL-2Rβγc ligands provided by the present disclosure can comprise an IL-2Rβ ligand having SEQ ID NO: 865 or an amino acid sequence having greater than 60%, greater than 70%, greater than 75%, greater than 80%, greater than 85%, greater than 90%, or greater than 95 sequence similarity to SEQ ID NO: 865; and an IL-2Rγc ligand having SEQ ID NO: 965 or an amino acid sequence having greater than 60%, greater than 70%, greater than 75%, greater than 80%, greater than 85%, greater than 90%, or greater than 95% sequence similarity to SEQ ID NO: 965.

[0617] In IL-2Rβγc ligands the C-terminus of the IL-2Rβ ligand can be linked to the N-terminus of the IL-2Rγc ligand.

[0618] An IL-2Rβγc ligand can comprise an IL-2Rβ ligand having a truncated amino acid sequence of SEQ ID NO: 865 and an IL-2Rγc ligand having a truncated amino acid sequence SEQ ID NO: 965.

[0619] An IL-2Rβγc ligand can comprise an IL-2Rβ ligand having a substituted SEQ ID NO: 865 and an IL-2Rγc ligand having a substituted SEQ ID NO: 965, wherein the substitutions can comprise from 1 to 5 conservative amino acid substitutions or non-conservative amino acid substitutions, such as from 1 to 2 conservative amino acid substitutions or non-conservative amino acid substitutions.

[0620] Each of the IL-2Rβ ligand and the IL-2Rγc ligand can independently comprise one or more flanking amino acids such as one or more glycines. For example, each of the N-terminus and the C-terminus of the IL-2Rβ ligand and the IL-2Rγc ligand can independently comprise from 1 to 5 glycines (SEQ ID NO: 9430).

[0621] The N-terminus of the IL-2Rβ ligand can be coupled to the C-terminus of the IL-2Rγc ligand through a flexible linker comprising, for example, from 1 to 10 amino acids. The linker can be, for example, a peptidyl linker having an amino acid sequence of any one of SEQ ID NOS: 9380-9407 and 9420-9428.

[0622] An IL-2Rβγc ligand can comprise the amino acid sequence of SEQ ID NO: 1263 (-GGWYPCWMAQLGELCDLDGGGGSGGVVCQDWEGVELCWQGG-), or an amino acid sequence having greater than 60%, greater than 70%, greater than 75%, greater than 80%, greater than 85%, greater than 90%, or greater than 95% sequence similarity to SEQ ID NO: 1263.

[0623] An IL-2Rβγc ligand can comprise the amino acid sequence of SEQ ID NO: 1264 (-WYPCWMAQLGELCDLDGGGGSGGVVCQDWEGVELCWQ-) or an amino acid sequence having greater than 60%, greater than 70%, greater than 75%, greater than 80%, greater than 85%, greater than 90%, or greater than 95% sequence similarity to SEQ ID NO: 1264.

[0624] An IL-2Rβγc ligand can comprise the amino acid sequence of SEQ ID NO: 1265 (-WYPCWMAQLGELCDLDGG-X³⁰⁰-GGVVCQDWEGVELCWQ-) or can comprise an amino acid sequence having greater than 60%, greater than 70%, greater than 80%, greater than 85%, greater than 90%, or greater than 95% amino acid sequence similarity to SEQ ID NO: 1265, where X³⁰⁰ can include from 1 to 20 amino acids. For example, X³⁰⁰ can be selected from a peptidyl linker having an amino acid sequence of any one of SEQ ID NOS: 9380-9407 and 9420-9428. X³⁰⁰ can be selected such that an IL-2Rβγc ligand of any one of SEQ ID NO: 1263-1265 or an amino acid sequence having greater than 60%, greater than 70%, greater than 75%, greater than 80%, greater than 85%, greater than 90%, or greater than 95% sequence similarity to any one of SEQ ID NO: 1263-1265 is an agonist for IL-2R or a partial agonist of IL-2R.

[0625] An IL-2Rβγc ligand can comprise the amino acid sequence of SEQ ID NO: 1266 (-WYPCWMAQLGELCDLD-X³⁰⁰-VVCQDWEGVELCWQ-) or an amino acid sequence having greater 60%, greater than 70%, greater than 80%, greater than 85%, greater than 90%, or greater than 95% amino acid sequence similarity to SEQ ID NO: 1266, where -X³⁰⁰ includes from 1 to 30 amino acids. -X³⁰⁰ can be selected such that an IL-2Rβγc ligand of SEQ ID NO: 1266 or an amino acid sequence having greater than 60%, greater than 70%, greater than 75%, greater than 80%, greater than 85%, greater than 90%, or greater than 95% sequence similarity to SEQ ID NO: 1266 is an agonist for IL-2R or a partial agonist of IL-2R.

[0626] In IL-2Rβγc ligands of any one of SEQ ID NO: 1263-1270 or an amino acid sequence having greater than 60%, greater than 70%, greater than 75%, greater than 80%, greater than 85%, greater than 90%, or greater than 95% sequence similarity to any one of SEQ ID NO: 1263-1270, the cysteines of the IL-2Rβ ligand can be bound together through a disulfide bond, and the cysteines of the IL-2Rγc ligand can be bound together through disulfide bonds. In certain IL-2Rβγc ligands, the cysteines of the IL-2Rβ ligand can be bound to the cysteines of the IL-2Rγc ligand.

[0627] An IL-2Rβγc ligand can comprise an amino acid sequence selected from any one of SEQ ID NOS: 1263-1270, a substituted amino acid sequence of any one of SEQ ID NOS: 1263-1270, a truncated amino acid sequence of any one of SEQ ID NOS: 1263-1270 an amino acid sequence of any one of SEQ ID NOS: 1263-1270 having from 1 to 5 flanking glycines (SEQ ID NO: 9430) on the N-terminus and/or the C-terminus, an amino acid sequence having greater than 60% sequence similarity to any one of SEQ ID NOS: 1263-1270, or a combination of any of the foregoing.

SEQ ID NO: 1263
-GGWYPCWMAQLGELCDLDGGGGSGGVVCQDWEGVELCWQGG-
SEQ ID NO: 1264
-WYPCWMAQLGELCDLDGGGGSGGVVCQDWEGVELCWQ-
SEQ ID NO: 1265
-WYPCWMAQLGELCDLDGG-X³⁰⁰-GGVVCQDWEGVELCWQ-
SEQ ID NO: 1266
-WYPCWMAQLGELCDLD-X³⁰¹X³⁰⁰-VVCQDWEGVELCWQ-
SEQ ID NO: 1267
-GWYPCWMAQLGELCDLDGGGGSGGVVCQDWEGVELCWQG-
SEQ ID NO: 1268
-GGWYPCWMAQLGELCDLDGGGGSGGVVCQDWEGVELCWQG-
SEQ ID NO: 1269
-GWYPCWMAQLGELCDLDGGGGSGGVVCQDWEGVELCWQGG-
SEQ ID NO: 1270
-(X³⁰¹)ₙ)-WYPCWMAQLGELCDLD-X³⁰⁰-VVCQDWEGVELCWQ-
(X³⁰¹)_{n+L}-

[0628] In an IL-2Rβγc ligand having an amino acid sequence of any one of SEQ ID NOS: 1265 and 1270, X³⁰⁰ can include from 1 to 20 amino acids. For example, X³⁰⁰ can be selected from having an amino acid sequence of any one of SEQ ID NOS: 9380-9407. For example, X³⁰⁰ can be GGS (SEQ ID NO: 9402) or GGGGSGG (SEQ ID NO: 9404). For example, X³⁰⁰ can be selected from a peptidyl linker having an amino acid sequence of any one of SEQ ID NOS: 9420-9428.

[0629] In ligands having SEQ ID NOS: 1266 and 1270, each X³⁰ can independently comprise a flanking amino acid such as a glycine, where each n is independently an integer from 0 to 5.

[0630] An IL-2Rβγc ligand having an amino acid sequence of any one of SEQ ID NOS: 1263-1270, the cysteines of the IL-2Rβ ligand can be bound together through a disulfide bond, and the cysteines of the Rye ligand can be bound together through a disulfide bond. In certain IL-2Rβγc ligands, the cysteines of the IL-2Rβ ligand can be bound to the cysteines of the Rγc ligand.

[0631] An IL-2Rβγc ligand can have greater than 60%, greater than 70%, greater than 75%, greater than 80%, greater than 85%, greater than 90%, or greater than 95% sequence similarity to any one of SEQ ID NOS: 1263-1270.

[0632] An IL-2Rβγc ligand can comprise an amino acid sequence selected from any one of SEQ ID NOS: 4070-4085, a substituted amino acid sequence of any one of SEQ ID NOS: 4070-4085, a truncated amino acid sequence of any one of SEQ ID NOS: 4070-4085, an amino acid sequence of any one of SEQ ID NOS: 4070-4085 having from 1 to 5 flanking glycines (SEQ ID NO: 9430) on the N-terminus and/or the C-terminus, an amino acid sequence having greater than 60% sequence similarity to any one of SEQ ID NOS: 4070-4085, or a combination of any of the foregoing.

SEQ ID NO: 4070
GGWYPCWIARVGELCDLEEGPVNRGGGGSGGVVCQDWEGVELCWQGG
SEQ ID NO: 4071
GGAVEFYPCWLARIGELCDLVEPGGGGSGGVVCQDWEGVELCWQGG
SEQ ID NO: 4072
GGWYPCWIARVGELCDMEGGGGSGGVVCQDWEGVELCWQGG
SEQ ID NO: 4073
GGEWFHDCFLAKVGDLCDLFLWGGGGSGGVVCQDWEGVELCWQGG
SEQ ID NO: 4074
GGRYVHDCFIAQVGDLCDLFLHGGGGSGGVVCQDWEGVELCWQGG
SEQ ID NO: 4075
GGRSLVDCFLVKVGDLCDFFNWGGGGSGGVVCQDWEGVELCWQGG
SEQ ID NO: 4076
GGWYPCWIARVGELCDLEGGGGSGGVVCQDWEGVELCWQGG
SEQ ID NO: 4077
GGWYPCWLAQVGELCDLDGGGGSGGVVCQDWEGVELCWQGG
SEQ ID NO: 4078
GGWYPCWIARVGELCDLEEGPVNRGGGGSGGGGSGGVVCQDWEGVELCW
QGG
SEQ ID NO: 4079
GGWYPCWIARVGELCDLEEGPVNRGGGGSGGGGSGGGGSGGVVCQDWEG
VELCWQGG
SEQ ID NO: 4080
GGRYVHDCFIAQVGDLCDLFLHGGGGSGGGGSGGVVCQDWEGVELCWQGG
SEQ ID NO: 4081
GGRYVHDCFIAQVGDLCDLFLHGGGGSGGGGSGGGGSGGVVCQDWEGVEL
CWQGG
SEQ ID NO: 4082
GGRYVHDCFIAQVGDLCDLFLHGGGGSGGGGSGGGGSGGGGSGGVVCQDW
EGVELCWQGG
SEQ ID NO: 4083
GGLVDCFKVKVGELCDLFGGGGSGGVVCQDWEGVELCWQGG
SEQ ID NO: 4084
GGRYVHDCFIAQVGDLCDLFLHGGGGSGGVVCQDWEGVELCWQGG
SEQ ID NO: 4085
GGWYSCWMAQLGELCDLDGGGGSGGVVCQDWEGVELCWQGG

[0633] An IL-2Rβγc ligand having an amino acid sequence of any one of SEQ ID NOS: 4070-4085, the cysteines of the IL-2Rβ ligand can be bound together through a disulfide bond, and the cysteines of the Rye ligand can be bound together through a disulfide bond. In certain IL-2Rβγc ligands, the cysteines of the IL-2Rβ ligand can be bound to the cysteines of the Rγc ligand.

[0634] An IL-2Rβγc ligand can have greater than 60%, greater than 70%, greater than 75%, greater than 80%, greater than 85%, greater than 90%, or greater than 95% sequence similarity to any one of SEQ ID NOS: 4070-4085.

[0635] In IL-2Rβγc ligand having SEQ ID NOS: 4070-4085 the ligand linker can be another ligand linker such as any of those disclosed herein.

[0636] An IL-2Rβγc ligand can have the amino acid sequence of any one of SEQ ID NOS: 4090-4094.

SEQ ID NO: 4090
Ac-WYPCWMAQLGELCDLDGGGGSGGVVCQDWEGVELCWQ-OH
SEQ ID NO: 4091
Ac-WYPCWMAQLGELCDLDGGGGSGGVVCQDWEGVALCWQ-OH
SEQ ID NO: 4092
Ac-WYPCW(Abu)AQLGELCDLDGGGGSGGVVCQDWEGVELCWQ-OH
SEQ ID NO: 4093
Ac-WYPCW(Abu)AQLGELCDLDGGGGSGGVVCQDWEGVALCWQ-OH
SEQ ID NO: 4094
Ac-WYPCWMAQLGELCDLDGGGGSGGVVCQDWEGVELCWQ-OH

[0637] An IL-2Rβγc ligand having the amino acid sequence of any one of SEQ ID NOS: 4090-4094 can bind the hIL-2Rβ and hIL-2Rγc subunits with an IC50 of less than 100 μM.

[0638] An IL IL-2Rβγc ligand can have the amino acid sequence of any one of SEQ ID NOS: 4095-4099.

SEQ ID NO: 4095
Ac-GGELLVDCFKVKVGELCDLFFGGGGGSGGVVCQDWEGVELCWQGG-OH
SEQ ID NO: 4096
Ac-GGRYVHDCFIAQVGDLCDLFLHGGGGSGGVVCQDWEGVELCWQGG-OH
SEQ ID NO: 4097
Ac-GGKWVHDCFLAKVGDVCDLFVVGGGGSGGVVCQDWEGVELCWQGG-OH
SEQ ID NO: 4098
Ac-GGRSLVDCFLVKVGDLCDFFNWGGGGSGGVVCQDWEGVELCWQGG-OH
SEQ ID NO: 4099
Ac-GGEWFHDCFLAKVGDLCDLFLWGGGGSGGVVCQDWEGVELCWQGG-OH

[0639] An IL-2Rβγc ligand having the amino acid sequence of any one of SEQ ID NOS: 4095-4099 can bind the hIL-2Rβ subunit and to the hIL-2Rγc subunit with an IC50 of less than 100 μM.

[0640] Certain IL-2Rβγc ligands having an amino acid sequence of any one of SEQ ID NOS: 1263-1270, 4070-4085, and 4090-4099 can bind the hIL-2Rβ subunit, to the hIL-2Rγc subunit, to the cyno-IL-2RP subunit, and to the cyno-IL-2Rγc subunit with an IC50 of less than 100 μM.

[0641] An IL-2Rβγc ligand provided by the present disclosure can bind to IL-2R such as human IL-2R with an IC₅₀ from 1 pM to 100 μM, from 10 pM to 10 μM, from 100 pM to 1 μM, from 0.001 μM to 1 μM, or from 0.01 μM to 1 μM.

[0642] An IL-2Rβγc ligand provided by the present disclosure can bind to IL-2R such as human IL-2R with an IC₅₀ of less than 100 μM, less than 10 μm, less than 1 μm, less than 100 pM, less than 10 pM, or less than 1 pM.

[0643] An IL-2Rβγc ligand provided by the present disclosure can bind to each of the IL-2Rβ subunit and to the IL-2Rγc subunit, such as each of the human IL-2Rβ subunit and the human IL-2Rγc subunit, with an IC₅₀ from 1 μM to 100 μM, from 10 μM to 10 μM, from 100 μM to 1 pM, from 0.001 pM to 1 pM, or from 0.01 pM to 1 pM.

[0644] An IL-2Rβγc ligand provided by the present disclosure can bind to each of the IL-2Rβ subunit and the IL-2Rγc subunit, such as each of the human IL-2Rβ subunit and to the human IL-2Rγc subunit with an IC₅₀ of less than 100 μm, less than 10 μm, less than 1 μm, less than 100 pM, less than 10 pM, or less than 1 pM.

[0645] An IL-2Rγc ligand provided by the present disclosure can exhibit an EC₅₀ for STAT5 phosphorylation in TF-1β cells and/or NK-92 cells, for example, of less than 100 μM, less than 10 μM, less than 1 μM, less than 100 pM, less than 10 pM, or less than 1 pM.

[0646] An IL-2Rγc ligand provided by the present disclosure can exhibit an EC₅₀ for STAT5 phosphorylation in TF-1β cells and/or NK-92 cells, for example, from 1 pM to 100 μM, from 10 pM to 10 μM, from 100 pM to 1 μM, from 0.001 μM to 1 μM, or from 0.01 μM to 1 μM.

[0647] Solid tumors exhibit metabolic differences from normal tissues. The greater reliance of solid tumors on glycolytic metabolism, produces a more acidic tumor microenvironment. For example, the solid tumor microenvironment can have a pH that is from 1 pH to 2 pH units less than that of most normal tissue. This pH differential can be exploited to enhance the activity of therapeutic agents in solid tumors relative to activity in normal peripheral tissue.

[0648] Using suitable pH-selective screening methods, IL-2Rβ and IL-2Rγc ligands can be identified that bind to IL-2R at low pH with an IC₅₀ that is less than the IC₅₀ for binding at a neutral pH. For example, the IC₅₀ for binding at a pH less than 6 can be at least 10 time or at least 100 times less than the IC₅₀ for binding at a pH greater than 6. These pH-biased IL-2Rβ and/or IL-2Rγc ligands can be incorporated into an IL-2Rβγc ligand to provide a pH-biased IL-2Rβγc ligand.

[0649] IL-2Rβγc ligands can comprise a pH-biased IL-2Rβ ligand and/or a pH-biased IL-2Rγc ligand.

[0650] These pH-biased IL-2Rβγc ligands can exhibit an enhanced therapeutic index with respect to increased cytotoxicity targeting solid tumors and with reduced toxicity to normal tissue.

[0651] An IL-2Rβγc ligand comprising a pH-biased IL-2Rβ ligand and/or a pH-biased IL-2Rβγc ligand can exhibit a pH-biased binding affinity (IC₅₀) to the IL-2Rβ subunit and/or to the IL-2Rγc subunit.

[0652] For example, a pH-biased IL-2Rβγc ligand can bind to IL-2R, such as human IL-2R, at pH 6 with an IC₅₀ at least at least 10% less than the IC₅₀ for binding to IL-2R, such as human IL-2R, at pH 7.5, at least 25% less, at least 50% less, at least 100% less, or at least 200% less than the IC₅₀ for binding to IL-2R, such as human IL-2R, at pH 7.5.

[0653] A pH-biased IL-2Rβγc ligand can bind to IL-2R, such as human IL-2R, at pH 6.0 with an IC₅₀ from 1 μM to 100 μM; and bind to IL-2R, such as human IL-2R, with an IC₅₀ greater than 100 μM at pH 7.5.

[0654] A pH-biased IL-2Rβγc ligand can bind to IL-2Rγc, such as human IL-2Rγc, at pH 6.0 with an IC₅₀ from 0.1 μM to 50 μM; and bind to IL-2Rγc, such as human IL-2Rγc with an IC₅₀ greater than 100 μM at pH 7.5.

[0655] A pH-biased IL-2Rβγc ligand can bind to IL-2Rγc, such as human IL-2Rβγc at pH 6.0 with an IC₅₀ of less than 100 μM; and bind to IL-2Rγc, such as human IL-2Rγc with an IC₅₀ greater than 100 μM at pH 7.5.

[0656] A pH-biased IL-2Rβγc ligand can bind to each of the IL-2Rβ subunit and to the IL-2Rγc subunit, such as the human IL-2Rβ subunit and the IL-2Rγc subunit, with an IC₅₀ of less than 100 μM at pH 6, and bind to each of the IL-2Rβ subunit and to the IL-2Rγc subunit, such as the human IL-2Rβ subunit and the IL-2Rγc subunit, with an IC₅₀ greater than 100 μM at pH 7.5.

[0657] pH-Biased IL-2Rβγc ligands can be useful, for example, to selectively activate cell expressing IL-2R in low pH cell environments such as in solid tumors compared to cells in neutral and high pH environments.

[0658] Using suitable pH-selective screening methods, pH-biased IL-2Rβγc ligands can be identified that have a higher binding affinity (lower IC₅₀) to IL-2R at lower pH and a lower binding affinity (higher IC₅₀) at a neutral pH. IL-2Rβγc ligands, tandem IL-2Rγc ligands, and IL-2Rβγc ligand constructs can include one or more pH-biased IL-2Rβ ligands and/or one or more pH-biased IL-2Rγc ligands. These pH-biased IL-2Rβγc ligands, pH-biased tandem IL-2Rβγc ligands, and pH-biased IL-2Rβγc ligand constructs can exhibit an enhanced therapeutic index reflecting increased cytotoxicity for targeting solid tumors and with reduced toxicity to normal tissue.

[0659] Similarly, using pH-selective functional screening methods IL-2Rβγc ligands and IL-2Rβγc ligand constructs can be selected that exhibit enhanced IL-2R agonist activity a lower pH such as at pH 6 compared to higher pH such as at pH 7. For example, pH-biased IL-2Rβγc ligands provided by the present disclosure can provide a lower EC₅₀ for STAT5 phosphorylation in TF-1β cells and/or NK-92 cells at pH 6.0 relative to the EC₅₀ for the same IL-2Rβγc ligand at pH 7.5. Such pH-biased IL-2Rβγc ligands exhibit enhanced IL-2R agonist activity or partial agonist activity at lower pH.

[0660] For example, a pH-biased IL-2Rβγc ligand can exhibit an EC₅₀ for STAT5 phosphorylation in TF-10 and NK-92 cells at pH 6 that is at least at least 10% less than the EC₅₀ for STAT5 phosphorylation in TF-10 and NK-92 cells at pH 7.5, at least 25% less, at least 50% less, at least 100% less, or at least 200% less than the EC₅₀ for STAT5 phosphorylation in TF-10 and NK-92 cells at pH 7.5.

[0661] Using pH-selective screening methods similar to those described in the examples, pH-biased IL-2RP ligands and/or IL-2Rγc ligands having other pH biases, such as other pH-biased functional properties or decreased IC₅₀ or EC₅₀ at pH values greater than normal healthy tissue, can be identified and incorporated into IL-2Rβγc ligands to provide additional biased IL-2Rβγc ligands and IL-2Rβγc ligand constructs.

[0662] Tandem IL-2Rβγc ligands provided by the present disclosure can comprise two or more IL-2Rβγc ligands. The two or more IL-2Rβγc ligands can be bound together to form a linear or non-linear structure. For example, a tandem IL-2Rβγc ligand can have the structure of Formula (8a) or Formula (8b):

BGL-(-Lₜ₁-BGL-)ₙ₁-Lₜ₁-BGL (8a)

Lₜ₂{(-Lₜ₁-BGL-)ₙ₂-L^{t1}-BGL}ₚ (9b)

[0663] where,
[0664] each BGL is independently selected from an IL-2Rβγc ligand; and
[0665] Lₜ₁ is a divalent tandem linker;
[0666] Lₜ₂ is a p-valent tandem linker;
[0667] n1 is an integer from 1 to 6; and
[0668] n2 is an integer from 0 to 6; and
[0669] p is an integer from 3 to 8.

[0670] In tandem IL-2Rβγc ligands of Formula (8a) and (8b), each IL-2Rβγc ligand can be the same.

[0671] In tandem IL-2Rβγc ligands of Formula (8a) and (8b), at least one IL-2Rβγc ligand can be different than another IL-2Rβγc ligand.

[0672] In tandem IL-2Rβγc ligands of Formula (8a) and (8b), each IL-2Rβγc ligand can independently be bound to a tandem linker through the N-terminus or through the C-terminus of the respective IL-2Rβγc ligand.

[0673] In tandem IL-2Rβγc ligands of Formula (8a) and (8b), each of the IL-2Rβγc ligands can comprise one or more flanking amino acids.

[0674] A tandem linker, Lₜ₁ and Lₜ₂, can be a peptidyl tandem linker and can, for example, from 1 to 50 amino acids, from 2 to 40 amino acids, or from 5 to 30 amino acids.

[0675] A tandem linker can comprise a chemical linker such as a triazole-containing linker provided by the present disclosure.

[0676] Each divalent tandem linker Lₜ can be the same as each of the other divalent tandem linkers, or at least one of the divalent tandem linkers can be different than another tandem linker.

[0677] In a tandem IL-2Rβγc ligand of Formula (8a), n can be, for example, 1, 2, 3, 4, 5, or 6.

[0678] In a tandem IL-2Rβγc ligand of Formula (8b), each n can independently be selected from 0, 1, 2, 3, 4, 5, or 6.

[0679] In a tandem IL-2Rβγc ligand of Formula (8b), p can be, for example, 3, 4, 5, 6, 7, or 8.

[0680] A p-valent tandem linker can comprise any suitable polyfunctional chemical moiety. For example, tandem IL-2Rβγc ligands of Formula (8a) and (8b) can have a molecular weight less than 10,000 Da, less than 6,000 Da, less than 2,000 Da, less than 1,000 Da, or less than 500 Da.

[0681] An IL-2Rβγc ligand provided by the present disclosure can be bound to a naturally occurring protein or to a synthetic molecule to provide an IL-2Rβγc ligand construct. Examples of suitable construct partners include polymers, proteins, Fc-fragments, immunoglobulin fragments, and antibodies.

[0682] An IL-2Rβγc ligand construct can be configured to provide desired pharmacokinetic properties, provide reduced immunogenicity, to target a specific cell population, and/or to provide enhanced therapeutic efficacy.

[0683] An IL-2Rβγc ligand can be bound to the construct partner through a construct linker.

[0684] An IL-2Rβγc ligand construct can comprise a single IL-2Rβγc ligand bound to a construct partner or two or more IL-2Rβγc ligands bound to a construct partner.

[0685] Each of the two or more IL-2Rβγc ligands bound to a construct partner can be the same, or at least one of the IL-2Rβγc ligands can be different than at least one of the other IL-2Rβγc ligands bound to the construct partner. The IL-2Rβγc ligands can differ, for example, with respect to the IL-2Rβ ligand, the IL-2Rγc ligand, the IL-2Rβγc ligand linker, and/or to the flanking amino acids.

[0686] Each of the IL-2Rβγc ligands can be independently bound to a construct partner through a respective construct linker. Each of the respective construct linkers can be the same, or at least one of the construct linkers can be different than at least one other construct linker. The construct linkers can differ, for example, with respect to the length and/or to the chemical composition.

[0687] Each of the IL-2Rβγc ligands can independently be bound to a construct partner through the N-terminus or the C-terminus of the respective IL-2Rβγc ligand.

[0688] An IL-2Rβγc ligand construct can comprise a tandem IL-2Rβγc ligand bound to a construct partner. The tandem IL-2Rβγc ligand can be bound to the construct partner through a construct linker.

[0689] An IL-2Rβγc ligand construct can comprise a single tandem IL-2Rβγc ligand bound to a construct partner or two or more tandem IL-2Rβγc ligands bound to a construct partner.

[0690] Each of the two or more tandem IL-2Rβγc ligands bound to a construct partner can be the same, or at least one of the tandem IL-2Rβγc ligands can be different than at least one of the other tandem IL-2Rβγc ligands bound to the construct partner. The tandem IL-2Rβγc ligands can differ, for example, with respect to the IL-2Rβ ligands, the IL-2Rγc ligands, the IL-2Rβγc ligand linkers, the tandem linkers, and/or the flanking amino acids.

[0691] Each of the tandem IL-2Rβγc ligands can be bound to a construct partner through a respective construct linker. Each of the respective construct linkers can be the same, or at least one of the construct linkers can be different than at least one other construct linker. The construct linkers can differ, for example, with respect to the length and/or to the chemical composition.

[0692] Each of the tandem IL-2Rβγc ligands can independently be bound to the construct partner through the N-terminus or the C-terminus of the respective tandem IL-2Rβγc ligand.

[0693] An IL-2Rβγc ligand construct can comprise at least one IL-2Rβ ligand and at least one tandem IL-2Rγc ligand bound to a construct partner. Each of the at least one IL-2Rβ ligand and the at least one IL-2Rγc ligand can independently be bound to the construct partner through a construct linker. For example, an IL-2Rβγc ligand construct can comprise from 1 to 10 IL-2Rβ ligands provided by the present and from 1 to 10 IL-2Rγc ligands provided by the present disclosure.

[0694] An IL-2Rβγc ligand construct can comprise, for example, at least one IL-2Rβγc ligand, at least one tandem IL-2Rβγc ligand, at least one IL-2Rβ ligand, and/or at least one IL-2Rγc ligand, providing that the IL-2Rβγc ligand comprises at least one IL-2Rβ ligand and at least one IL-2Rγc ligand.

[0695] An IL-2Rβγc ligand construct can compromise one or more IL-2Rβγc ligands bound to a side chain of a molecule such as an amino acid forming a polymer or protein.

[0696] An IL-2Rβγc ligand construct can compromise one or more IL-2Rβγc ligands in which the one or more IL-2Rβγc ligands is incorporated into the backbone of the polymer or polypeptide. Thus, an IL-2Rβγc ligand construct can comprise one or more IL-2Rβγc ligands in which the one or more IL-2Rβγc ligands are bound to a N-terminus of a polypeptide, bound to a C-terminus of a polypeptide, bound to an amino acid side chain of a polypeptide, and/or incorporated into the amino acid sequence of the polypeptide.

[0697] IL-2Rβγc ligand constructs provided by the present disclosure include fusion proteins.

[0698] Examples of suitable fusion protein partners include Fc-fragments, immunoglobulins such as IgG1, IgG2, and IgG4, immunoglobulin fragments such as IgG1, IgG2, and IgG4 fragments, naturally occurring proteins such as human serum albumin (HSA), antibodies, other human proteins and mutants and/or variants thereof; proteins, and polypeptides. A fusion protein partner can be a naturally occurring protein, a modified-naturally occurring protein, or a synthetic protein.

[0699] A fusion partner can be used to provide a desirable pharmacokinetic profile, for cell-targeting, for dual pharmacology, and/or for enhancing therapeutic efficacy.

[0700] For example, an IL-2Rβγc ligand provided by the present disclosure can be fused to a protein that increases the circulating half-life of the IL-2Rβγc ligand. Fusions of therapeutic proteins with IgG or the IgG-Fc chain can accomplish this by increasing the hydrodynamic radius of the protein, thus reducing renal clearance, and through Neonatal Fc Receptor (FcRn)-mediated recycling of the fusion protein, thus prolonging the circulating half-life. Other fusion proteins can be designed to tailor properties such as the pharmacokinetics, biodistribution, pharmacodynamics, pharmacology, cytotoxicity, selectivity, and/or targeting.

[0701] An IL-2Rβγc ligand fusion protein provided by the present disclosure can comprise one or more IL-2Rβγc ligands bound to a fusion protein partner. Each of the one or more IL-2Rβγc ligands can be independently bound to a fusion protein partner through the N-terminus or through the C-terminus of the respective IL-2Rβγc ligand. Each of the one or more IL-2Rβγc ligands can be the same. At least one of the one or more IL-2Rβγc ligands can be different than at least one other IL-2Rβγc ligand. The amino acid sequence at the junction between an IL-2Rβγc ligand and a fusion partner protein can be either a direct fusion of the two protein sequences or can be a fusion with an intervening peptidyl fusion (construct) linker. Peptidyl linkers can be included as spacers between an IL-2Rβγc ligand and the fusion partner. Peptidyl linkers can promote proper protein folding and stability of the component protein and the one or more IL-2Rβγc ligands, improve protein expression, and/or can enhance bioactivity of the IL-2Rβγc ligand and/or the fusion partner.

[0702] Peptidyl linkers used in IL-2Rβγc ligand fusion proteins can be designed to be unstructured flexible peptides. Peptidyl linkers can be, for example, rich in glycine and serine, such as repeats of a sequence such as, for example, a peptidyl linker having any one of SEQ ID NOS: 9380-9401, where n is an integer from 1 to 10. A flexible peptidyl linker with a fully extended β-strand conformation can have an end-to-end length, for example, of 3.5 Å per residue. Thus, a peptidyl linker of 5, 10, 15, or 10 residues can have a maximum fully extended length of 17.5 Å, 35 Å, 52.5 Å, 70 Å, 140 Å, or more than 140 Å, respectively.

[0703] Peptidyl linkers can be rigid linkers, such as linkers including proline and other amino acids such as alanine, lysine or glutamic acid. For example, a rigid linker can have an amino acid sequence of any one of SEQ ID NOS: 9420-9425. A peptidyl linker can facilitate providing an appropriate conformation and orientation of individual fusion protein moieties to facilitate the engagement of an IL-2Rβγc ligand with the IL-2Rβ subunit and/or IL-2Rγc subunit of IL-2R, facilitate binding of the IL-2Rβγc ligand to IL-2R, enable fusion protein recycling, and/or prolong the circulating half-life of the IL-2Rβγc ligand.

[0704] There are multiple options for the design and construction of a fusion protein comprising one or more IL-2Rβγc ligands and which can be selected to obtain an IL-2Rβγc fusion protein having the desired biological activity and pharmaceutical characteristics. Design options include, for example, the IL-2Rβγc ligand including the selection of the IL-2Rβ ligand, the IL-2Rγc ligand, and the IL-2Rβγc ligand linker; the fusion partner protein binding moiety; the configuration of the fusion partner binding moiety in the fusion protein; the peptidyl linker binding an IL-2Rβγc ligand to the fusion partner; and the fusion partner protein.

[0705] In general, preparation of IL-2Rβγc ligand fusion proteins provided by the present disclosure can be prepared using recognized recombinant DNA techniques involving, for example, polymerase chain amplification reactions (PCR), preparation of plasmid DNA, cleavage of DNA with restriction enzymes, preparation of oligonucleotides, ligation of DNA, isolation of mRNA, introduction of the DNA into a suitable cell, transformation or transfection of a host, and culturing of the host. Additionally, IL-2Rβγc ligand fusion proteins can be isolated and purified using chaotropic agents and using well-known electrophoretic, centrifugation, and chromatographic methods.

[0706] IL-2Rβγc ligand fusion proteins provided by the present disclosure can comprise one or more small ubiquitin-related modifier (SUMO) proteins. Modification of cellular proteins by the ubiquitin-like modifier SUMO can regulate various cellular processes, such as nuclear transport, signal transduction, and stabilization of proteins. Once covalently attached to cellular targets, SUMO regulates protein/protein and protein/DNA interactions, as well as localizes and stabilizes the target protein.

[0707] For example, an IL-2Rβγc ligand can be bound to a first linker, which is bound to a SUMO protein, which is further bound to a second linker binding the SUMO protein to a fusion partner such as an IgG or Fc-fragment. SUMO fusions can enhance expression, promote solubility, and/or facilitate optimized protein folding. Attachment of a highly stable structure such as that of ubiquitin or SUMO at the N- or C-terminus of a fusion partner protein can increase the yield by increasing stability. The solubilizing effect of ubiquitin and ubiquitin-like proteins may also be explained in part by the outer hydrophilicity and inner hydrophobicity of the core structure of ubiquitin and SUMO, exerting a detergent-like effect on otherwise insoluble proteins.

[0708] One or more IL-2Rβγc ligands can be bound to a construct partner that provides desired pharmacokinetic properties. For example, one or more IL-2Rβγc ligands can be bound to a synthetic polymer or to a protein, such as a naturally occurring protein, that exhibits an extended half-life in the systemic circulation.

[0709] An IL-2Rβγc ligand provided by the present disclosure can be conjugated to or fused to molecules that extend the serum half-life of the IL-2Rβγc ligand without increasing the risk that such half-life extension would increase the likelihood or the intensity of a side-effect or adverse event in a patient. Dosing of extended serum half-life IL-2Rβγc ligands can allow for prolonged target coverage with lower systemic maximal exposure (Cₘₐₓ). Extended serum half-life can allow for use of lower administered doses and/or a less frequent dosing regimen of an IL-2Rβγc ligand or IL-2Rβγc ligand construct.

[0710] The serum half-life of an IL-2Rβγc ligand can be extended by any suitable method. Such methods include linking an IL-2Rβγc ligand to a peptide that binds to the neonatal Fc receptor or linking an IL-2Rβγc ligand to a protein having extended serum half-life such as IgG, an IgG Fc fragment or to human serum albumin (HSA).

[0711] Examples of IL-2Rβγc ligand pharmacokinetic constructs include, (a) recombinantly fusing one or more IL-2Rβγc ligands to a naturally long-half-life protein or protein domain such as Fc fusion, transferrin fusion or albumin fusion; (b) recombinantly fusing one or more IL-2Rβγc ligands to an inert polypeptide such as XTEN®, a homoamino acid polymer (HAP, HAPylation), a proline-alanine-serine polymer (PAS, PASylation), an elastin-like peptide (ELP, ELPylation), or a gelatin-like protein GLK polymer; (c) increasing the hydrodynamic radius by chemical conjugation of one or more IL-2Rβγc ligands to a repeat chemical moiety such as PEGylation or hyaluronic acid; (d) increasing the negative charge of the one or more IL-2Rβγc ligands by polysialylation or by fusing to a negatively charged highly sialylated peptide such as carboxy-terminal peptide (CTP of chorionic gonadotropin (CG) p-chain); or (e) conjugating of one or more IL-2Rβγc ligands to a peptide or protein-binding domain of a normally long half-life protein such as human serum albumin (HSA), transferrin, fusion to the constant fragment Fc chain of a human immunoglobulin IgG, or fusion to non-natural polypeptides such as XTEN®.

[0712] One or more IL-2Rβγc ligands can be bound to a synthetic polymer.

[0713] For example, an IL-2Rβγc ligands can be conjugated to polyethylene glycol (PEG) chains (to extend the half-life of the IL-2Rβγc ligand in the systemic circulation. A PEG can have a molecular weight, for example, from 5 kDa to 100 kD, from 10 kDa to 80 kDa, or from 20 kDa to 60 kDa.

[0714] PEGylation can be achieved chemically or enzymatically and the biophysical and biochemical properties of the conjugate can depend, for example, on structure, size, number and location of PEG chains. PEGylation can prolong the circulation half-life of an IL-2Rβγc ligand by masking proteolytic cleavage sites and/or by increasing the effective hydrodynamic radii of the ligands, thereby reducing renal clearance.

[0715] An IL-2Rβγc ligand can be conjugated to either linear or branched-chain monomethoxy polyethylene glycol (mPEG), resulting in increases in the molecular mass and hydrodynamic radius and decrease the rate of glomerular filtration by the kidney. PEG is a highly flexible uncharged, mostly non-immunogenic, hydrophilic, and non-biodegradable molecule, which generates a larger hydrodynamic radius than an equivalently sized protein. PEGylation has been used widely to lengthen the half-life of pharmacologically active compounds.

[0716] Similar to IgG, serum albumin displays an unusually long circulation half-life. Half-life prolongation of these functionally and structurally unrelated proteins is derived primarily from interaction with FcRn. Although HSA binds FcRn at a different site than IgG, both interactions are pH-dependent and result in FcRn-mediated rescue from cellular catabolism. IL-2Rβγc ligand constructs capable of extending the circulation half-life include, for example, genetic fusion to HSA, conjugation to HSA-binding moieties, and fusion to HSA-bonding antibodies or antibody fragments.

[0717] One or more IL-2Rβγc ligands can be bound to an XTEN® polypeptide (Amunix Pharmaceuticals Inc.). XTEN® polypeptides are generally 200 amino acids or more in length, are designed to mask antigen binding regions of scFvs, to be unstructured and to have a low immunogenicity. XTEN® polypeptides can increase the circulating half-life of therapeutic agents. One or more IL-2Rβγc ligands can be bound to an XPAT® polypeptide (Amunix Pharmaceuticals, Inc.). XPAT® polypeptides include substrates for proteases and can be designed to be active with one or more proteases, to select the cleavage rate, and to impart specificity.

[0718] Genetic fusing of one or more IL-2Rβγc ligands to serum transferrin (Tf) can result in enhanced pharmacokinetics. Serum transferrin is an 80 kDa glycoprotein that mediates iron transport from the systemic circulation into cells and tissues. When bound to ferric ions, transferrin displays high affinity for the transferrin receptors (TfRs) displayed on the surface of most cell types. Upon interaction, the Tf/TfR complex is internalized via receptor-mediated endocytosis into endosomes, where iron is released and Tf/TfR is then recycled to the cell surface. Fusion of protein therapeutics to Tf or TfR-binding antibodies can be used for half-life extension, targeting of malignant cells overexpressing TfRs and targeting of the rai capillary endothelium for transport of therapeutics across the blood brain barrier.

[0719] Fusion of an IL-2Rβγc ligand to IgG or Fc can result in increased avidity of the IL-2Rβγc ligand provides for purification via protein G./A affinity chromatography and can prolong the circulation half-life of the IL-2Rβγc ligand.

[0720] Half-life extension of IL-2Rβγc ligand/IgG fusion proteins results from a combination of reduced renal clearance due to increased molecular size and FcRn-mediated recycling.

[0721] One or more IL-2Rβγc ligands can be bound to any suitable IgG including, for example, IgG1, IgG2, or IgG4. The one or more IL-2Rβγc ligands can be bound to any suitable portion of IgG such as the light chain VL or to the heavy chain VH and including the N-terminus, the C-terminus, an amino acid side chain, or can be incorporated into the amino acid sequence of the light or heavy chain of IgG.

[0722] IL-2Rβγc ligand constructs provided by the present disclosure can comprise IL-2Rβγc ligand/IgG constructs.

[0723] An IgG construct comprises at least one heavy chain and at least one light chain. An IL-2Rβγc ligand can be bound to the N-terminus of the heavy chain, to the N-terminus of the light chain, or to the N-terminus of the heavy chain, and to the N-terminus of the light chain.

[0724] An IL-2Rβγc ligand can be bound to the C-terminus of the heavy chain, for example, to the CH3 domain, to the N-terminus of the heavy chain and/or to the N-terminus of the light chain.

[0725] In an IgG construct, an IL-2Rβγc ligand can be bound to the N-terminus of one or both heavy chains, to the N-terminus of one or both light chains, and/or to one or both C-termini of the heavy chains.

[0726] In an IgG construct, an IL-2Rβγc ligand can be bound to an amino acid side chain of IgG.

[0727] In an IgG construct, an IgG heavy chain and/or an IgG light chain can comprise one or more IL-2Rβγc ligands incorporated into the amino acid sequence forming the IgG heavy chain and/or the IgG light chain.

[0728] Examples of IL-2Rβγc ligand IgG constructs are shown in FIGS. 20A-20J.

[0729] In an IL-2Rβγc construct each linker bonding an IL-2Rβγc ligand to the IgG can independently be the same or can be different.

[0730] For example, an IL-2Rβγc ligand can be bound to the C-terminus of one or both IgG heavy chains, to the C-terminus of one or both IgG light chains, to the N-terminus of one or both IgG heavy chains, and/or to the N-terminus of one or both IgG light chains. Examples showing IL-2Rβγc ligand constructs in which an IL-2Rβγc ligand is bound to the IgG heavy and/or light chains are shown in FIG. 20A-20J. Each of the IL-2Rβγc ligands can be bound to the IgG through a suitable construct linker.

[0731] One or more IL-2Rβγc ligands can be bound to an IgG fragment such as a single light chain VL domain, a single heavy chain VH domain or to the Fc region. The fragments can be derived from any suitable immunoglobulin such as IgA, IgD, IgE, IgG, or IgM. The fragments can be derived from any suitable IgG such as, for example, IgG1, IgG2, or IgG4.

[0732] One or more IL-2Rβγc ligands can be bound to an Fc-fragment. The Fc-fragment can be monomeric, can be dimeric, or can be a modified Fc-fragment. A dimeric Fc-fragment can comprise one or more disulfide bonds on the N-terminus. An example of a modification is a knob-into-hole modification comprising a knob modification in the CH3 domain of one of the immunoglobulin heavy chain and a hole modification in the other immunoglobulin heavy chain.

[0733] Constructs provided by the present disclosure include IL-2Rβγc ligand-Fc fusion proteins. An Fc chain can include two different polypeptides that self-assemble into either homodimeric Fc chains or heterodimeric Fc chains. The fusion proteins can include an Fc chain, one or more Fc chain linkers, and one or more IL-2Rβγc ligands. An Fc chain linker binds an IL-2Rβγc ligand provided by the present disclosure to an Fc chain.

[0734] The Fc chain can comprise the Fc chain of any suitable immunoglobulin isotype including IgA, IgD, IgE, IgG, and IgM immunoglobulin isotypes. The Fc-fragment can be derived from any suitable IgG immunoglobulin including, for example, an IgG1, IgG2, or IgG4.

[0735] An IL-2Rβγc ligand Fc-fusion protein can comprise one or more IL-2Rβγc ligands. Each of the one or more IL-2Rβγc ligands can be the same or can be different than other IL-2Rβγc ligands bound to a Fc chain.

[0736] An IL-2Rβγc ligand Fc-fragment construct, i.e., IL-2Rβγc Fc fusion, can comprise an IL-2Rβγc ligand bound to the C-terminus of one Fc-chain or to the C-terminus of both Fc-chains of the Fc-fragment.

[0737] An IL-2Rβγc ligand Fc fusion can comprise one IL-2Rβγc ligand bound to the N-terminus of the Fc-fragment or two IL-2Rβγc ligands bound to the N-terminus of the Fc-fragment.

[0738] An IL-2Rβγc ligand Fc fusion can comprise one or two IL-2Rβγc ligands bound to the C-terminus of the Fc-fragment and one or two IL-2Rβγc ligands can be bound to the N-terminus of the Fc-fragment.

[0739] Each IL-2Rβγc ligand can be covalently bound to an Fc-fragment through an Fc linker. Each Fc linker binding an IL-2Rβγc ligand to an Fc-fragment can be the same or different.

[0740] Each IL-2Rβγc ligand can independently be bound to an Fc linker through the N-terminus or through the C-terminus of the IL-2Rβγc ligand.

[0741] Examples of IL-2Rβγc ligand Fc-fragment constructs are shown in FIGS. 20A-20J and 21A-21C.

[0742] Examples of constructs comprising an IL-2Rβγc ligand bound to an hIgG1 or hIgG2 immunoglobulin Fc-fragment are provided in Table 6.

TABLE 6
Ligand immunoglobulin constructs.

hIgG2-Fc-(PA)10 IL-2Rβγc ligand
SEQ ID NO: 8061
ERKSSVECPPCPAPPVAGPSVFLFPPKPKDTLMISRTPEVTCVVVDVSHEDPEVQFNWYVDG
VEVHNAKTKPREEQFNSTFRVVSVLTVVHQDWLNGKEYKCKVSNKGLPAPIEKTISKTKG
QPREPQVYTLPPSREEMTKNQVSLTCLVKGFYPSDIAVEWESNGQPENNYKTTPPMLDSDG
SFFLYSKLTVDKSRWQQGNVFSCSVMHEALHNHYTQKSLSLSPGAPAPAPAPAPAPAPAPA
PAPAGGWYPCWIARVGELCDLEEGPVNRGGGGSGGVVCQDWEGVELCWQGG
hIgG2-Fc-(PA)10 IL-2Rβγc ligand
SEQ ID NO: 8062
ERKSSVECPPCPAPPVAGPSVFLFPPKPKDTLMISRTPEVTCVVVDVSHEDPEVQFNWYVDG
VEVHNAKTKPREEQFNSTFRVVSVLTVVHQDWLNGKEYKCKVSNKGLPAPIEKTISKTKG
QPREPQVYTLPPSREEMTKNQVSLTCLVKGFYPSDIAVEWESNGQPENNYKTTPPMLDSDG
SFFLYSKLTVDKSRWQQGNVFSCSVMHEALHNHYTQKSLSLSPGAPAPAPAPAPAPAPAPA
PAPAGGAVEFYPCWLARIGELCDLVEPGGGGSGGVVCQDWEGVELCWQGG
hIgG2-Fc-(PA)10 IL-2Rβγc ligand
SEQ ID NO: 8063
ERKSSVECPPCPAPPVAGPSVFLFPPKPKDTLMISRTPEVTCVVVDVSHEDPEVQFNWYVDG
VEVHNAKTKPREEQFNSTFRVVSVLTVVHQDWLNGKEYKCKVSNKGLPAPIEKTISKTKG
QPREPQVYTLPPSREEMTKNQVSLTCLVKGFYPSDIAVEWESNGQPENNYKTTPPMLDSDG
SFFLYSKLTVDKSRWQQGNVFSCSVMHEALHNHYTQKSLSLSPGAPAPAPAPAPAPAPAPA
PAPAGGWYPCWIARVGELCDMEGGGGSGGVVCQDWEGVELCWQGG
hIgG2-Fc-(PA)10 IL-2Rβγc ligand
SEQ ID NO: 8064
ERKSSVECPPCPAPPVAGPSVFLFPPKPKDTLMISRTPEVTCVVVDVSHEDPEVQFNWYVDG
VEVHNAKTKPREEQFNSTFRVVSVLTVVHQDWLNGKEYKCKVSNKGLPAPIEKTISKTKG
QPREPQVYTLPPSREEMTKNQVSLTCLVKGFYPSDIAVEWESNGQPENNYKTTPPMLDSDG
SFFLYSKLTVDKSRWQQGNVFSCSVMHEALHNHYTQKSLSLSPGAPAPAPAPAPAPAPAPA
PAPAGGEWFHDCFLAKVGDLCDLFLWGGGGSGGVVCQDWEGVELCWQGG
hIgG2-Fc-(PA)10 IL-2Rβγc ligand
SEQ ID NO: 8065
ERKSSVECPPCPAPPVAGPSVFLFPPKPKDTLMISRTPEVTCVVVDVSHEDPEVQFNWYVDG
VEVHNAKTKPREEQFNSTFRVVSVLTVVHQDWLNGKEYKCKVSNKGLPAPIEKTISKTKG
QPREPQVYTLPPSREEMTKNQVSLTCLVKGFYPSDIAVEWESNGQPENNYKTTPPMLDSDG
SFFLYSKLTVDKSRWQQGNVFSCSVMHEALHNHYTQKSLSLSPGAPAPAPAPAPAPAPAPA
PAPAGGRYVHDCFIAQVGDLCDLFLHGGGGSGGVVCQDWEGVELCWQGG
hG2-Fc-(PA)10 IL-2Rβγc ligand
SEQ ID NO: 8066
ERKSSVECPPCPAPPVAGPSVFLFPPKPKDTLMISRTPEVTCVVVDVSHEDPEVQFNWYVDG
VEVHNAKTKPREEQFNSTFRVVSVLTVVHQDWLNGKEYKCKVSNKGLPAPIEKTISKTKG
QPREPQVYTLPPSREEMTKNQVSLTCLVKGFYPSDIAVEWESNGQPENNYKTTPPMLDSDG
SFFLYSKLTVDKSRWQQGNVFSCSVMHEALHNHYTQKSLSLSPGAPAPAPAPAPAPAPAPA
PAPAGGRSLVDCFLVKVGDLCDFFNWGGGGSGGVVCQDWEGVELCWQGG
hIgG2-Fc-(PA)10 IL-2Rβγc ligand
SEQ ID NO: 8067
ERKSSVECPPCPAPPVAGPSVFLFPPKPKDTLMISRTPEVTCVVVDVSHEDPEVQFNWYVDG
VEVHNAKTKPREEQFNSTFRVVSVLTVVHQDWLNGKEYKCKVSNKGLPAPIEKTISKTKG
QPREPQVYTLPPSREEMTKNQVSLTCLVKGFYPSDIAVEWESNGQPENNYKTTPPMLDSDG
SFFLYSKLTVDKSRWQQGNVFSCSVMHEALHNHYTQKSLSLSPGAPAPAPAPAPAPAPAPA
PAPAGGWYPCWIARVGELCDLEGGGGSGGVVCQDWEGVELCWQGG
hIgG2-Fc-(PA)10 IL-2Rβγc ligand
SEQ ID NO: 8068
ERKSSVECPPCPAPPVAGPSVFLFPPKPKDTLMISRTPEVTCVVVDVSHEDPEVQFNWYVDG
VEVHNAKTKPREEQFNSTFRVVSVLTVVHQDWLNGKEYKCKVSNKGLPAPIEKTISKTKG
QPREPQVYTLPPSREEMTKNQVSLTCLVKGFYPSDIAVEWESNGQPENNYKTTPPMLDSDG
SFFLYSKLTVDKSRWQQGNVFSCSVMHEALHNHYTQKSLSLSPGAPAPAPAPAPAPAPAPA
PAPAGGWYPCWLAQVGELCDLDGGGGSGGVVCQDWEGVELCWQGG
hIgG2-Fc-(PA)10 IL-2Rβγc ligand
SEQ ID NO: 8069
ERKSSVECPPCPAPPVAGPSVFLFPPKPKDTLMISRTPEVTCVVVDVSHEDPEVQFNWYVDG
VEVHNAKTKPREEQFNSTFRVVSVLTVVHQDWLNGKEYKCKVSNKGLPAPIEKTISKTKG
QPREPQVYTLPPSREEMTKNQVSLTCLVKGFYPSDIAVEWESNGQPENNYKTTPPMLDSDG
SFFLYSKLTVDKSRWQQGNVFSCSVMHEALHNHYTQKSLSLSPGAPAPAPAPAPAPAPAPA
PAPAGGWYPCWIARVGELCDLEEGPVNRGGGGSGGGGSGGVVCQDWEGVELCWQGG
hIgG2-Fc-(PA)10 IL-2Rβγc ligand
SEQ ID NO: 8070
ERKSSVECPPCPAPPVAGPSVFLFPPKPKDTLMISRTPEVTCVVVDVSHEDPEVQFNWYVDG
VEVHNAKTKPREEQFNSTFRVVSVLTVVHQDWLNGKEYKCKVSNKGLPAPIEKTISKTKG
QPREPQVYTLPPSREEMTKNQVSLTCLVKGFYPSDIAVEWESNGQPENNYKTTPPMLDSDG
SFFLYSKLTVDKSRWQQGNVFSCSVMHEALHNHYTQKSLSLSPGAPAPAPAPAPAPAPAPA
PAPAGGWYPCWIARVGELCDLEEGPVNRGGGGSGGGGSGGGGSGGVVCQDWEGVELCW
QGG
hIgG2-Fc-(PA)10 IL-2Rβγc ligand
SEQ ID NO: 8071
ERKSSVECPPCPAPPVAGPSVFLFPPKPKDTLMISRTPEVTCVVVDVSHEDPEVQFNWYVDG
VEVHNAKTKPREEQFNSTFRVVSVLTVVHQDWLNGKEYKCKVSNKGLPAPIEKTISKTKG
QPREPQVYTLPPSREEMTKNQVSLTCLVKGFYPSDIAVEWESNGQPENNYKTTPPMLDSDG
SFFLYSKLTVDKSRWQQGNVFSCSVMHEALHNHYTQKSLSLSPGAPAPAPAPAPAPAPAPA
PAPAGGWYPCWIARVGELCDLEEGPVNRGGGGSGGGGSGGGGSGGGGSGGVVCQDWEG
VELCWQGG
hIgG2-Fc-(PA)10 IL-2Rβγc ligand
SEQ ID NO: 8072
ERKSSVECPPCPAPPVAGPSVFLFPPKPKDTLMISRTPEVTCVVVDVSHEDPEVQFNWYVDG
VEVHNAKTKPREEQFNSTFRVVSVLTVVHQDWLNGKEYKCKVSNKGLPAPIEKTISKTKG
QPREPQVYTLPPSREEMTKNQVSLTCLVKGFYPSDIAVEWESNGQPENNYKTTPPMLDSDG
SFFLYSKLTVDKSRWQQGNVFSCSVMHEALHNHYTQKSLSLSPGAPAPAPAPAPAPAPAPA
PAPAGGRYVHDCFIAQVGDLCDLFLHGGGGSGGGGSGGVVCQDWEGVELCWQGG
hIgG2-Fc-(PA)10 IL-2Rβγc ligand
SEQ ID NO: 8073
ERKSSVECPPCPAPPVAGPSVFLFPPKPKDTLMISRTPEVTCVVVDVSHEDPEVQFNWYVDG
VEVHNAKTKPREEQFNSTFRVVSVLTVVHQDWLNGKEYKCKVSNKGLPAPIEKTISKTKG
QPREPQVYTLPPSREEMTKNQVSLTCLVKGFYPSDIAVEWESNGQPENNYKTTPPMLDSDG
SFFLYSKLTVDKSRWQQGNVFSCSVMHEALHNHYTQKSLSLSPGAPAPAPAPAPAPAPAPA
PAPAGGRYVHDCFIAQVGDLCDLFLHGGGGSGGGGSGGGGSGGVVCQDWEGVELCWQG
G
hIgG2-Fc-(PA)10 IL-2Rβγc ligand
SEQ ID NO: 8074
ERKSSVECPPCPAPPVAGPSVFLFPPKPKDTLMISRTPEVTCVVVDVSHEDPEVQFNWYVDG
VEVHNAKTKPREEQFNSTFRVVSVLTVVHQDWLNGKEYKCKVSNKGLPAPIEKTISKTKG
QPREPQVYTLPPSREEMTKNQVSLTCLVKGFYPSDIAVEWESNGQPENNYKTTPPMLDSDG
SFFLYSKLTVDKSRWQQGNVFSCSVMHEALHNHYTQKSLSLSPGAPAPAPAPAPAPAPAPA
PAPAGGRYVHDCFIAQVGDLCDLFLHGGGGSGGGGSGGGGSGGGGSGGVVCQDWEGVEL
CWQGG
ZW1 A-(PA)10 IL-2Rβγc ligand
SEQ ID NO: 8075
DKTHTCPPCPAPEAAGGPSVFLFPPKPKDTLMISRTPEVTCVVVDVSHEDPEVKFNWYVDG
VEVHNAKTKPREEQYNSTYRVVSVLTVLHQDWLNGKEYKCKVSNKALGAPIEKTISKAKG
QPREPQVYVYPPSRDELTKNQVSLTCLVKGFYPSDIAVEWESNGQPENNYKTTPPVLDSDG
SFALVSKLTVDKSRWQQGNVFSCSVMHEALHNHYTQKSLSLSPGAPAPAPAPAPAPAPAPA
PAPAGGLVDCFKVKVGELCDLFGGGGSGGVVCQDWEGVELCWQGG
ZW1_B
SEQ ID NO: 8076
DKTHTCPPCPAPEAAGGPSVFLFPPKPKDTLMISRTPEVTCVVVDVSHEDPEVKFNWYVDG
VEVHNAKTKPREEQYNSTYRVVSVLTVLHQDWLNGKEYKCKVSNKALGAPIEKTISKAKG
QPREPQVYVLPPSRDELTKNQVSLLCLVKGFYPSDIAVEWESNGQPENNYLTWPPVLDSDG
SFFLYSKLTVDKSRWQQGNVFSCSVMHEALHNHYTQKSLSLSPG
Cys-Knob-(PA)10 IL-2Rβγc ligand
SEQ ID NO: 8077
DKTHTCPPCPAPEAAGGPSVFLFPPKPKDTLMISRTPEVTCVVVDVSHEDPEVKFNWYVDG
VEVHNAKTKPREEQYNSTYRVVSVLTVLHQDWLNGKEYKCKVSNKALGAPIEKTISKAKG
QPREPQVYTLPPCRDELTKNQVSLWCLVKGFYPSDIAVEWESNGQPENNYKTTPPVLDSDG
SFFLYSKLTVDKSRWQQGNVFSCSVMHEALHNHYTQKSLSLSPGAPAPAPAPAPAPAPAPA
PAPAGGLVDCFKVKVGELCDLFGGGGSGGVVCQDWEGVELCWQGG
Cys-Hole
SEQ ID NO: 8078
DKTHTCPPCPAPEAAGGPSVFLFPPKPKDTLMISRTPEVTCVVVDVSHEDPEVKFNWYVDG
VEVHNAKTKPREEQYNSTYRVVSVLTVLHQDWLNGKEYKCKVSNKALGAPIEKTISKAKG
QPREPQVCTLPPSRDELTKNQVSLSCAVKGFYPSDIAVEWESNGQPENNYKTTPPVLDSDGS
FFLVSKLTVDKSRWQQGNVFSCSVMHEALHNHYTQKSLSLSPG
ZW1_A-(PA)10 IL-2Rβγc ligand
SEQ ID NO: 8079
DKTHTCPPCPAPEAAGGPSVFLFPPKPKDTLMISRTPEVTCVVVDVSHEDPEVKFNWYVDG
VEVHNAKTKPREEQYNSTYRVVSVLTVLHQDWLNGKEYKCKVSNKALGAPIEKTISKAKG
QPREPQVYVYPPSRDELTKNQVSLTCLVKGFYPSDIAVEWESNGQPENNYKTTPPVLDSDG
SFALVSKLTVDKSRWQQGNVFSCSVMHEALHNHYTQKSLSLSPGAPAPAPAPAPAPAPAPA
PAPAGGRYVHDCFIAQVGDLCDLFLHGGGGSGGVVCQDWEGVELCWQGG
Cys-Knob-(PA)10 IL-2Rβγc ligand
SEQ ID NO: 8080
DKTHTCPPCPAPEAAGGPSVFLFPPKPKDTLMISRTPEVTCVVVDVSHEDPEVKFNWYVDG
VEVHNAKTKPREEQYNSTYRVVSVLTVLHQDWLNGKEYKCKVSNKALGAPIEKTISKAKG
QPREPQVYTLPPCRDELTKNQVSLWCLVKGFYPSDIAVEWESNGQPENNYKTTPPVLDSDG
SFFLYSKLTVDKSRWQQGNVFSCSVMHEALHNHYTQKSLSLSPGAPAPAPAPAPAPAPAPA
PAPAGGRYVHDCFIAQVGDLCDLFLHGGGGSGGVVCQDWEGVELCWQGG
ZW1_A- (GS)10 IL-2Rβγc ligand
SEQ ID NO: 8081
DKTHTCPPCPAPEAAGGPSVFLFPPKPKDTLMISRTPEVTCVVVDVSHEDPEVKFNWYVDG
VEVHNAKTKPREEQYNSTYRVVSVLTVLHQDWLNGKEYKCKVSNKALGAPIEKTISKAKG
QPREPQVYVYPPSRDELTKNQVSLTCLVKGFYPSDIAVEWESNGQPENNYKTTPPVLDSDG
SFALVSKLTVDKSRWQQGNVFSCSVMHEALHNHYTQKSLSLSPGGSGSGSGSGSGSGSGSG
SGSGGWYSCWMAQLGELCDLDGGGGSGGVVCQDWEGVELCWQGG
Cys-Knob-(GS)10 IL-2Rβγc ligand
SEQ ID NO: 8082
DKTHTCPPCPAPEAAGGPSVFLFPPKPKDTLMISRTPEVTCVVVDVSHEDPEVKFNWYVDG
VEVHNAKTKPREEQYNSTYRVVSVLTVLHQDWLNGKEYKCKVSNKALGAPIEKTISKAKG
QPREPQVYTLPPCRDELTKNQVSLWCLVKGFYPSDIAVEWESNGQPENNYKTTPPVLDSDG
SFFLYSKLTVDKSRWQQGNVFSCSVMHEALHNHYTQKSLSLSPGGSGSGSGSGSGSGSGSG
SGSGGWYSCWMAQLGELCDLDGGGGSGGVVCQDWEGVELCWQGG

[0743] The components of the IL-2Rβγc ligand constructs having SEQ ID NOS: 8061-8082 is summarized in Table 7.

TABLE 7
Components of IL-2Rβγc ligand constructs.

| IL-2Rβγc | | | | IL-2Rβγc | |
|---|---|---|---|---|---|
| Ligand Construct | Construct | Linker | IL-2Rβ Ligand | Ligand Linker | IL-2Rβγc Ligand |
| SEQ ID NO: 8061 | hIgG2-Fc | (PA)10 | SEQ ID NO: 2930 | GGGGS | SEQ ID NO: 9340 |
| | | (SEQ ID | | (SEQ ID NO: | |
| | | NO: | | 9395) | |
| | | 9428) | | | |
| SEQ ID NO: 8062 | hIgG2-Fc | (PA)10 | SEQ ID NO: 2931 | GGGGS | SEQ ID NO: 9340 |
| | | (SEQ ID | | (SEQ ID NO: | |
| | | NO: | | 9395) | |
| | | 9428) | | | |
| SEQ ID NO: 8063 | hIgG2-Fc | (PA)10 | SEQ ID NO: 2932 | GGGGS | SEQ ID NO: 9340 |
| | | (SEQ ID | | (SEQ ID NO: | |
| | | NO: | | 9395) | |
| | | 9428) | | | |
| SEQ ID NO: 8064 | hIgG2-Fc | (PA)10 | SEQ ID NO: 2933 | GGGGS | SEQ ID NO: 9340 |
| | | (SEQ ID | | (SEQ ID NO: | |
| | | NO: | | 9395) | |
| | | 9428) | | | |
| SEQ ID NO: 8065 | hIgG2-Fc | (PA)10 | SEQ ID NO: 2934 | GGGGS | SEQ ID NO: 9340 |
| | | (SEQ ID | | (SEQ ID NO: | |
| | | NO: | | 9395) | |
| | | 9428) | | | |
| SEQ ID NO: 8066 | hIgG2-Fc | (PA)10 | SEQ ID NO: 2935 | GGGGS | SEQ ID NO: 9340 |
| | | (SEQ ID | | (SEQ ID NO: | |
| | | NO: | | 9395) | |
| | | 9428) | | | |
| SEQ ID NO: 8067 | hIgG2-Fc | (PA)10 | SEQ ID NO: 2936 | GGGGS | SEQ ID NO: 9340 |
| | | (SEQ ID | | (SEQ ID NO: | |
| | | NO: | | 9395) | |
| | | 9428) | | | |
| SEQ ID NO: 8068 | hIgG2-Fc | (PA)10 | SEQ ID NO: 2937 | GGGGS | SEQ ID NO: 9340 |
| | | (SEQ ID | | (SEQ ID NO: | |
| | | NO: | | 9395) | |
| | | 9428) | | | |
| SEQ ID NO: 8069 | hIgG2-Fc | (PA)10 | SEQ ID NO: 2930 | (GGGGS)2 | SEQ ID NO: 9340 |
| | | (SEQ ID | | (SEQ ID NO: | |
| | | NO: | | 9396) | |
| | | 9428) | | | |
| SEQ ID NO: 8070 | hIgG2-Fc | (PA)10 | SEQ ID NO: 2930 | (GGGGS)3 | SEQ ID NO: 9340 |
| | | (SEQ ID | | (SEQ ID NO: | |
| | | NO: | | 9397) | |
| | | 9428) | | | |
| SEQ ID NO: 8071 | hIgG2-Fc | (PA)10 | SEQ ID NO: 2930 | (GGGGS)4 | SEQ ID NO: 9340 |
| | | (SEQ ID | | (SEQ ID NO: | |
| | | NO: | | 9398) | |
| | | 9428) | | | |
| SEQ ID NO: 8072 | hIgG2-Fc | (PA)10 | SEQ ID NO: 2934 | (GGGGS)2 | SEQ ID NO: 9340 |
| | | (SEQ ID | | (SEQ ID NO: | |
| | | NO: | | 9396) | |
| | | 9428) | | | |
| SEQ ID NO: 8073 | hIgG2-Fc | (PA)10 | SEQ ID NO: 2934 | (GGGGS)3 | SEQ ID NO: 9340 |
| | | (SEQ ID | | (SEQ ID NO: | |
| | | NO: | | 9397) | |
| | | 9428) | | | |
| SEQ ID NO: 8074 | hIgG2-Fc | (PA)10 | SEQ ID NO: 2934 | (GGGGS)4 | SEQ ID NO: 9340 |
| | | (SEQ ID | | (SEQ ID NO: | |
| | | NO: | | 9398) | |
| | | 9428) | | | |
| SEQ ID NO: 8075 | ZW1_A | (PA) 10 | SEQ ID NO: 2938 | GGGGS | SEQ ID NO: 9340 |
| | | (SEQ ID | | (SEQ ID NO: | |
| | | NO: | | 9395) | |
| | | 9428) | | | |
| SEQ ID NO: 8076 | ZW1_B | — | — | — | — |
| SEQ ID NO: 8077 | Cys-Knob | (PA)10 | SEQ ID NO: 2934 | GGGGS | SEQ ID NO: 9340 |
| | | (SEQ ID | | (SEQ ID NO: | |
| | | NO: | | 9395) | |
| | | 9428) | | | |
| SEQ ID NO: 8078 | Cys-Hole | — | — | — | — |
| SEQ ID NO: 8079 | ZW1-A | (PA)10 | SEQ ID NO: 2934 | GGGGS | SEQ ID NO: 9340 |
| | | (SEQ ID | | (SEQ ID NO: | |
| | | NO: | | 9395) | |
| | | 9428) | | | |
| SEQ ID NO: 8080 | Cys-Knob | (PA 10 | SEQ ID NO: 2934 | GGGGS | SEQ ID NO: 9340 |
| | | (SEQ ID | | (SEQ ID NO: | |
| | | NO: | | 9395) | |
| | | 9428) | | | |
| SEQ ID NO: 8081 | ZW1_A | (GS)10 | SEQ ID NO: 2939 | GGGGS | SEQ ID NO: 9340 |
| | | (SEQ ID | | (SEQ ID NO: | |
| | | NO: | | 9395) | |
| | | 9407) | | | |
| SEQ ID NO: 8082 | Cys-Knob | (GS)10 | SEQ ID NO: 2939 | GGGGS | SEQ ID NO: 9340 |
| | | (SEQ ID | | (SEQ ID NO: | |
| | | NO: | | 9395) | |
| | | 9407) | | | |

[0744] An Fc fusion protein can comprise two Fc chains with at least one of the Fc chains comprising a fused IL-2Rβγc ligand and optionally an Fc-linker. The dimeric Fc-fusion proteins can be configured to have one IL-2Rβγc ligand, which can be referred to as monovalent IL-2Rβγc ligand-Fc-fusion, where an IL-2Rβγc ligand is covalently bound to one of the Fc chains and the other Fc chain is not bound to an IL-2Rβγc ligand. In a bivalent IL-2Rβγc ligand Fc-fusion an IL-2Rβγc ligand is fused to each Fc chain.

[0745] In addition to homodimeric bivalent IL-2Rβγc ligand Fc fusion proteins, in a monovalent IL-2Rβγc ligand Fc-fusion protein, one Fc chain can be empty and heterodimerization variants can be used to bring the two Fc chains together. These embodiments rely on the use of two different variant Fc sequences, that can self-assemble to form heterodimeric Fc chains and heterodimeric Fe fusion proteins. There are a number of mechanisms that can be used to generate the heterodimers. In addition, these mechanisms can be combined to ensure high heterodimerization. Heterodimerization variants can include steric variants such as knobs and holes or skew variants, charge pairs variants, and pH variants.

[0746] IL-2Rβγc ligand constructs provided by the present disclosure include constructs in which one or more IL-2Rβ ligands are bound to a construct partner and independently one or more IL-2Rγc ligands are bound to the construct partner. For example, an IL-2Rβ ligand can be bound to the C-terminus of an Fc fragment or immunoglobulin and an IL-2Rγc ligand can be bound to the N-terminus of an Fc fragment or an immunoglobulin. As another example, an IL-2Rβ ligand can be bound to the C-terminus of one heavy chain of an Fc fragment or immunoglobulin and an IL-2Rγc ligand can be bound to the other heavy chain of the Fc fragment or immunoglobulin.

[0747] A construct comprising one or more IL-2Rβ ligands and/or one or more IL-2Rγc ligands can comprise one or more IL-2Rβγc ligands bound to the construct partner. FIGS. 22 and 23 show examples of Fc fragments and immunoglobulins, respectively, in which ligands are bound to the C-terminus and/or to the N-terminus of the construct partner. Each of the ligands can independently be selected from an IL-2Rβγc ligand, an IL-2Rβ ligand, or an IL-2Rγc ligand.

[0748] In constructs comprising a protein or synthetic polymer, one or more IL-2Rβ ligands, one or more IL-2Rγc ligands, and/or one or more IL-2Rβγc ligands can be bound to the construct partner. For example, the ligands can be bound to the C-terminus and N-terminus of the protein or to the terminal groups of the polymer, and/or to functionalized side chains.

[0749] Each of the one or more IL-2Rβ ligands and one or more IL-2Rγc ligands can independently be bound to a construct partner through a construct linker. The construct linker can be, for example, any of the rigid or flexible linkers disclosed herein, and can be selected to facilitate a desired interaction with IL-2R.

[0750] IL-2Rβγc ligand constructs provided by the present disclosure can comprise a construct linker covalently binding an IL-2Rβγc ligand or a tandem IL-2Rβγc ligand to a construct partner including, for example, any of the peptides, polymers, Fc-fragments, immunoglobulin fragments, and antibodies disclosed herein.

[0751] A construct linker can be configured to facilitate binding of an IL-2Rβγc ligand to a binding site on IL-2R. A construct linker can be configured to facilitate activation of IL-2R by an IL-2Rβγc ligand.

[0752] A construct linker can be a peptidyl construct linker. A peptidyl construct linker can comprise, for example, from 2 to 30 amino acids, from 2 to 25 amino acids, from 2 to 20 amino acids, from 2 to 15 amino acids or from 2 to 10 amino acids. A peptidyl construct linker can comprise, for example, less than 30 amino acids, less than 25 amino acids, less than 20 amino acids, less than 15 amino acids, less than 10 amino acids, or less than 5 amino acids. A peptidyl construct linker can comprise, for example, more than 2 amino acids, more than 4 amino acids, more than 8 amino acids, more than 12 amino acids, or more than 16 amino acids.

[0753] A peptidyl construct linker can have a length, for example, from 5 Å to 500 Å, such as from 1 Å to 400 Å, from 50 Å to 300 Å, or from 100 Å to 200 Å. A peptidyl construct linker can have a length, for example, greater than 5 Å, greater than 10 Å, greater than 50 Å, greater than 100 Å, greater than 200 Å, greater than 300 Å, or greater than 400 Å.

[0754] A construct linker can be a chemical construct linker. A chemical construct linker can have a length, for example, from 5 Å to 500 Å, such as from 10 Å to 400 Å, from 5 Å to 300 Å, or from 100 Å to 200 Å. A chemical linker can have a length, for example, greater than 5 Å, greater than 10 Å, greater than 50 Å, greater than 100 Å, greater than 200 Å, greater than 300 Å, or greater than 400 Å.

[0755] A chemical construct linker can comprise a backbone comprising, for example, from 3 to 100 bonds, from 5 to 90 bonds, from 10 to 80 bonds, or from 20 to 60 bonds. A chemical construct linker can comprise a backbone comprising, for example, greater than 3 bonds, greater than 5 bonds, greater than 10 bonds greater than 20 bonds greater than 50 bonds, or greater than 100 bonds.

[0756] Examples of suitable peptidyl construct linkers include peptides having any one of SEQ ID NOS: 9380-9401 and 9420-9425, where n can be an integer from 1 to 30, such as from 2 to 25, from 2 to 20, from 2 to 16, from 3 to 12, from 4 to 10, or from 6 to 8.

[0757] An IL-2Rβγc ligand can be bound to a construct linker through the N-terminus or through the C-terminus of the IL-2Rβγc ligand.

[0758] Examples of IL-2Rβγc ligand constructs having different linker configurations are shown in FIGS. 19A-19C.

[0759] In IL-2Rβγc ligand constructs having more than one IL-2Rβγc ligand, each of the IL-2Rβγc ligands can be bound to the construct partner through an independent construct. Each of the construct linkers can be the same or at least one of the construct linkers can be different. Each of the more than one IL-2Rβγc ligands can be bound to a respective construct partner through the N-terminus or through the C-terminus of the IL-2Rβγc ligand.

[0760] A construct linker can comprise a cleavable construct linker. A cleavable construct linker can be cleaved in vivo, for example, in the presence of a certain pH, enzymatically, or by application of energy such as by application of electromagnetic radiation including ultraviolet light or infrared irradiation.

[0761] An IL-2Rβγc ligand construct can comprise one or more IL-2Rβγc ligands bound to a checkpoint inhibitor, such as a PD-1 checkpoint inhibitor including, for example, an antibody checkpoint inhibitor such as pembrolizumab and cemiplimab.

[0762] In an IL-2Rβγc checkpoint inhibitor construct, the one or more IL-2Rβγc ligands can have the amino acid sequence of any one of SEQ ID NOS: 1263-1270, or an amino acid sequence having greater than 60%, greater than 70%, greater than 80%, greater than 85%, greater than 90%, or greater than 95% amino acid sequence similarity to any one of SEQ ID NOS: 1263-1270.

[0763] In IL-2Rβγc checkpoint inhibitor antibody constructs the one or more IL-2Rβγc ligands can have an amino acid sequence of any one of SEQ ID NOS: 1263-1270 or an IL-2Rβγc ligand having an amino acid sequence similarity to any one of SEQ ID NOS: 1263-1270 bound to the C-terminus of one heavy chain, the C-terminus of both heavy chains, the N-terminus of one heavy chain, the N-terminus of both heavy chains, the N-terminus of on light chain, the N-terminus of both light chains, or a combination of any of the foregoing. Each of the one or more IL-2Rβγc ligands can independently be bound to the checkpoint inhibitor antibody through a construct linker, which can comprise, for example, from 1 to 50 amino acids.

[0764] The N-terminus of the IL-2Rβγc ligand can be bound to the checkpoint inhibitor antibody through the construct linker.

[0765] An IL-2Rβγc ligand construct can be a pembrolizumab/IL-2Rβγc fusion protein where the light chain has the amino acid sequence of SEQ ID NO: 1218 (FP7), or an amino acid sequence having greater than 60%, greater than 70%, greater than 80%, greater than 85%, greater than 90%, or greater than 95% amino acid sequence similarity to SEQ ID NO: 1218 (FP7); and the heavy chain has the amino acid sequence of SEQ ID NO: 1219 (FP8), or an amino acid sequence having greater than 60%, greater than 70%, greater than 80%, greater than 85%, greater than 90%, or greater than 95% amino acid sequence similarity to SEQ ID NO: 1219 (FP8).

[0766] A pembrolizumab/IL-2Rβγc fusion protein can comprise two pembrolizumab heavy chains and two pembrolizumab light chains, wherein an IL-2Rβγc ligand having an amino acid sequence of any one of SEQ ID NOS: 1263-1270 or an amino acid sequence having greater than 60%, greater than 70%, greater than 80%, greater than 85%, greater than 90%, or greater than 95% amino acid sequence similarity to SEQ ID NOS: 1263-1270 is bound to the C-terminus of one heavy chain, the C-terminus of both heavy chains, the N-terminus of one heavy chain, the N-terminus of both heavy chains, the N-terminus of one light chain, the N-terminus of both light chains, or a combination of any of the foregoing. Each of the one or more IL-2Rβγc ligands can independently be bound to the pembrolizumab antibody through a construct linker, which can comprise, for example, from 1 to 50 amino acids.

[0767] The N-terminus of the IL-2Rβγc ligand can be bound to pembrolizumab through the construct linker.

[0768] An IL-2Rβγc ligand construct can be a cemiplimab/IL-2Rβγc fusion protein where the light chain has the amino acid sequence of SEQ ID NO: 1220 (FP9), or an amino acid sequence having greater than 60%, greater than 70%, greater than 80%, greater than 85%, greater than 90%, or greater than 95% amino acid sequence similarity to SEQ ID NO: 1220 (FP9); and the heavy chain has the amino acid sequence of SEQ ID NO: 1221 (FP10)), or an amino acid sequence having greater than 60%, greater than 70%, greater than 80%, greater than 85%, greater than 90%, or greater than 95% amino acid sequence similarity to SEQ ID NO: 1221 (FP10).

[0769] A cemiplimab/IL-2Rβγc fusion protein can comprise two cemiplimab heavy chains and two cemiplimab light chains, wherein an IL-2Rβγc ligand having an amino acid sequence of any one of SEQ ID NOS: 1263-1270, or an amino acid sequence having greater than 60%, greater than 70%, greater than 80%, greater than 85%, greater than 90%, or greater than 95% amino acid sequence similarity to any one of SEQ ID NOS: 1263-1270 is bound to the C-terminus of one heavy chain, the C-terminus of both heavy chains, the N-terminus of one heavy chain, the N-terminus of both heavy chains, the N-terminus of one light chain, the N-terminus of both light chains, or a combination of any of the foregoing. Each of the one or more IL-2Rβγc ligands can independently be bound to the cemiplimab antibody through a construct linker, which can comprise, for example, from 1 to 50 amino acids.

[0770] The N-terminus of the IL-2Rβγc ligand can be bound to cemiplimab through the construct linker.

[0771] An IL-2Rβγc ligand construct can be a hIgG2/IL-2Rβγc fusion protein where hIgG2 has the amino acid sequence of SEQ ID NO: 1268 or an amino acid sequence greater than 60%, greater than 70%, greater than 80%, greater than 85%, greater than 90%, or greater than 95% amino acid sequence similarity to SEQ ID NO: 1268 and one or more IL-2Rβγc ligands having an amino acid sequence of any one of SEQ ID NOS: 1263-1270 or an amino acid sequence greater than 60%, greater than 70%, greater than 80%, greater than 85%, greater than 90%, or greater than 95% amino acid sequence similarity to any one of SEQ ID NOS: 1263-1270 is bound to one C-terminus of hIgG2, both C-termini of hIgG2, one N-terminus of hIgG2, both N-termini of hIgG2, or a combination of any of the foregoing. Each of the one or more IL-2Rβγc ligands can independently be bound to IgG2 through a construct linker, which can comprise, for example, from 1 to 50 amino acids. The IgG fusion partner can be hIgG1 or hIgG4 and the one or more IL-2Rβγc ligands can be bound to the hIgG1 or hIgG4 fusion partner as described for hIgG2.

[0772] The N-terminus of the IL-2Rβγc ligand can be bound to hIgG2 through the construct linker.

[0773] An IL-2Rβγc ligand/immunoglobulin fusion protein can comprise one or more IL-2Rβγc ligands bound to an immunoglobulin such as hIgG1, hIgG2, hIgG3, or hIgG4. Examples of IL-2Rβγc ligand/immunoglobulin constructs are shown in FIGS. 23A-23F, where the immunoglobulin comprises heavy chains 231 and light chains 232, and IL-2Rβγc ligands 233 bound to either the C-terminus and/or N-terminus of the heavy chains 231 and/or light chains 232.

[0774] An IL-2Rβγc ligand construct can comprise one or more IL-2Rβγc ligands bound to an immunoglobulin Fc-fragment. The one or more IL-2Rβγc ligands can have the amino acid sequence of any one of SEQ ID NOS: 1263-1270, or an amino acid sequence having greater than 60%, greater than 70%, greater than 80%, greater than 85%, greater than 90%, or greater than 95% amino acid sequence similarity to any one of SEQ ID NOS: 1263-1270. The IL-2Rβγc ligands can be bound to the C-terminus and/or to the N-terminus and to one or both of the Fc-chains of the Fc fragment. As shown in FIGS. 22A-22F, an IL-2Rβγc ligand 223 can be bound to one or both Fc-chains 221 and 222.

[0775] The Fc-fragment can be derived, for example, from any suitable immunoglobulin such as hIgG1, hIgG2, hIgG3, or hIgG4.

[0776] The N-terminus of the IL-2Rβγc ligand can be bound to an Fc-fragment through the construct linker. The construct linker can be selected, for example, from a construct linker having an amino acid sequence of any one of SEQ ID NOS: 9380-9407. The construct linker can be selected, for example, from a peptidyl construct linker having an amino acid sequence of any one of SEQ ID NOS: 9420-9428. A construct linker can comprise, for example, from 1 to 100 amino acids such as from 1 to 50, from 1 to 20, from 1 to 10 or from 1 to 5 amino acids where each amino acid is independently selected from S and G. A construct linker can comprise, for example, from 1 to 100 amino acids such as from 1 to 50, from 1 to 20, from 1 to 10 or from 1 to 5 amino acids where each amino acid is independently selected from proline, alanine, lysine, and glutamic acid. A construct linker can comprise, for example, (PA)ₙ (SEQ ID NO: 9421) where n can be, for example, an integer from 1 to 20. Each construct linker can be selected such that an IL-2Rβγc ligand to which it is bound is an IL-2R agonist. The linker can be, for example, a peptidyl linker selected from any one of SEQ ID NOS: 9384, 9389, and 9394-9398.

[0777] Functionally, an IL-2Rβγc binding compound provided by the present disclosure can be, for example, a full IL-2R agonist, a partial IL-2R agonist a diagnostic reagent, an imaging reagent, a targeting compound, a cytotoxic compound, and/or a compound exhibiting dual pharmacology.

[0778] An IL-2Rβγc binding compound provided by the present disclosure can be attached to one or more moieties that impart a property to the compound that enhances therapeutic efficacy. Examples of properties include potency, aqueous solubility, polarity, lipophilicity, pharmacokinetics, targeting, bioavailability, pH-dependent binding, bioactivity, pharmacodynamics, cellular activity, metabolism, efficacy, reversible incapacitation (caging), selectivity, or a combination of any of the foregoing.

[0779] A cell-specific targeting moiety can comprise a moiety that has an affinity for a component on the surface of a cell such as a receptor, a protein, or an epitope. A targeting moiety can comprise, for example, a ligand or an antibody having an affinity to a cell surface component.

[0780] A targeting moiety can direct and concentrate compounds comprising an IL-2Rβγc binding compound at the cells, population of cells, or tissue targeted by the targeting moiety.

[0781] A targeting moiety can enhance the potency of IL-2R agonism or IL-2R antagonism for the cells or population of cells being targeted.

[0782] A targeting moiety can provide a differential response to IL-2R agonism or to IL-2R antagonism between the cells being targeted and the cells not being targeted by the targeting moiety.

[0783] A targeting moiety can provide a differential response to IL-2R agonism or IL-2R antagonism between cells having a high expression level of the targeted component and cells having a lower expression level of the targeted component.

[0784] An IL-2Rβγc binding compound can further comprise a bioactive moiety or a bioactive molecule. An IL-2Rβγc compound can be used to deliver the bioactive moiety or bioactive molecule to cells, to a population of cells, or to a tissue expressing the IL-2Rβ subunit and the Rγc subunit.

[0785] The bioactive moiety or molecule can be non-cleavable and capable of exerting a biological activity when bound to an IL-2Rβγc binding compound.

[0786] The bioactive moiety or molecule can be cleavable. The moiety can be cleavable by any suitable mechanism such as by pH, enzymatic, thermal, and/or electromagnetic mechanisms. Electromagnetic mechanisms include, for example, exposing the compounds to infrared, visible, or ultraviolet radiation, where the bioactive moiety is attached to the compounds comprising a ligand through a photolabile moiety capable of being cleaved by the radiation.

[0787] The bioactive molecule can be non-cleavable but otherwise activatable, such as for example, activatable by exposure to electromagnetic radiation.

[0788] Ligands can be selected to have enhanced binding to the IL-2Rβ and/or Rγc subunit at a certain pH. For example, a pH-selective ligand can have a greater binding affinity to the IL-2Rβ and/or Rye subunit at low pH commensurate with that of a solid tumor microenvironment. IL-2Rβγc binding compounds comprising low-pH selective ligands can be used to preferentially activate cells in low pH environments expressing the IL-2Rβ subunit and the Rγc subunit compared to cells in normal pH environments associated with healthy tissue.

[0789] Thus, A IL-2Rβγc binding compounds comprising selective IL-2Rβ and/or Rγc ligands such as pH-selective IL-2Rβ and/or Rγc ligands can be used with other pH-selective bioactive moieties and molecules.

[0790] A bioactive moiety or bioactive molecule can itself be selective for a particular cell population. For example, a bioactive moiety or bioactive molecule can exhibit a greater or lesser binding affinity, potency, and/or activity at the cell being targeted by a selective ligand. For example, the bioactive moiety or molecule can exhibit greater bioactivity in a low pH tumor microenvironment when targeted by a pH-selective ligand. In this example, the bioactive moiety is directed to cells located in the low-pH tumor microenvironment that express the IL-2Rβ subunit by the pH-selective ligand. Thus, the activity of the pH-selective bioactive moiety is enhanced in the low-pH tumor microenvironment.

[0791] An IL-2Rβγc binding compound can further comprise a cytotoxic moiety or cytotoxic molecule. Such compounds can be used to deliver a cytotoxic moiety or compound to a cell expressing the IL-2Rβγc subunit. The cytotoxic moiety or molecule can exert cytotoxicity when bound to the compound or can be cleavable and the moiety or molecule can be cytotoxic when released from the compound; or the cytotoxic moiety can be activated by electromagnetic radiation.

[0792] The cytotoxic moiety or molecule can be used to deplete cells expressing the IL-2Rβ subunit being targeted.

[0793] Cytotoxic an IL-2Rβγc binding compounds can have more than one Il-2Rβγc ligands and thereby can exhibit a higher affinity and/or selectivity to cells, populations of cells, and tissue that highly expresses the IL-2Rβ subunits compared to cells having a lower expression level of the IL-2Rβ subunit.

[0794] Cytotoxic IL-2Rβγc binding compounds can further include a cell surface targeting component. Such cytotoxic compounds can exhibit enhanced efficacy to cells, populations of cells, and tissue expressing the IL-2Rβ subunit and the surface target component.

[0795] Examples of suitable cytotoxic molecules include anti-microtubule agents, alkylating agents, and DNA minor groove binding agents.

[0796] An IL-2Rβγc binding compound can comprise a moiety having an additional pharmacological activity other than that mediated by activation of the IL-2 receptor. The pharmacological activity can be an activity that has a therapeutic efficacy that is synergistic with that of IL-2R agonist or antagonist activity or the pharmacological activity can be an activity that has a therapeutic efficacy that is not synergistic with that of the IL-2R agonist or antagonist activity. Examples of suitable pharmacological moieties include antibodies and antibody fragments that are inhibitors of checkpoint molecules, pro-apoptotic and anti-apoptotic molecules, cytotoxic molecules, agonists of chemokine, antagonists of chemokine, cytokine, growth factor and other cell surface receptors, and ligands and inhibitors of cell surface adhesion molecules such as integrins.

[0797] One or more ligands provided by the present disclosure can be bound to a molecule comprising a targeting moiety that confers the ability to target the one or more IL-2Rβγc ligands to specific tissues or cells in a patient. A targeting moiety can have an affinity for a cell-surface protein or receptor expressed on the surface of a target tissue or target cell, and thereby can direct a dual ligand to the target tissue or cell. Examples of targeting moieties include antigen binding moieties including antibodies and fragments thereof specific for cell surface proteins, ligands, biological receptors, and antigens.

[0798] An antibody can bind to an antigen expressed on the surface of the target cell type. The antibody may not have any useful or known useful pharmacologic function but serves to direct an IL-2Rβγc binding construct to preferentially target a cell type or tissue compared to cell types or tissues not expressing the targeted antigen or having an expression level of the targeted antigen less than that of the targeted cell type or tissue. An antibody can have a useful pharmacological function when bound to a cell surface antigen. These constructs are referred to as dual pharmacology IL-2Rβγc binding constructs.

[0799] An IL-2Rβγc binding compound can include, for example, a tumor-targeting moiety such as, for example, a tumor-specific antibody, a tumor-specific antibody fragment, a tumor-specific protein, a tumor-specific peptide, a non-peptidyl tumor cell ligand, or a combination of any of the foregoing.

[0800] An IL-2Rβγc binding compound can include an immune cell-targeting moiety such as, for example, an immune cell-specific antibody, an immune cell-specific antibody fragment, an immune cell-specific protein, an immune cell-specific peptide, a non-peptidyl immune cell-ligand, or a combination of any of the foregoing.

[0801] One or more IL-2Rβγc ligands can be bound to a molecule comprising a targeting moiety that confers the ability to target the one or more IL-2Rβγc ligands to specific tissues or cells in a patient. A targeting moiety can have an affinity for a cell-surface protein or receptor expressed on the surface of a target tissue or target cell, and thereby can direct an IL-2Rβγc ligand to the target tissue or cell. Examples of targeting moieties include antigen binding moieties including antibodies and fragments thereof specific for cell surface proteins, ligands, biological receptors, and antigens.

[0802] An antibody can bind to an antigen expressed on the surface of the target cell type. The antibody may not have any useful or known useful pharmacologic function but serves to direct an IL-2Rβγc ligand construct to preferentially target a cell type or tissue compared to cell types or tissues not expressing the targeted antigen or having an expression level of the targeted antigen less than that of the targeted cell type or tissue. An antibody can have a useful pharmacological function when bound to a cell surface antigen. These constructs are referred to as dual pharmacology IL-2Rβγc ligand constructs.

[0803] An IL-2Rβγc ligand fusion protein can comprise one or more antigen binding moieties. The two more antigen binding moieties can be directed to the same antigen or to different antigens.

[0804] A targeting moiety can be an antigen binding moiety and the IL-2Rβγc fusion protein can be an immunoconjugate. The immunoconjugate can comprise one or more antigen binding moieties capable of binding to an antigen expressed on a cell surface, on the surface of virus-infected cells on the surfaces of diseased cells in the blood serum, and/or in the extracellular matrix.

[0805] An antigen binding moiety can comprise an antibody or an antibody fragment. The antigen binding moiety can be an immunoglobulin molecule such as, for example, an IgG class immunoglobulin, including an IgG1, IgG2, or IgG4 isotype. An IL-2Rβγc ligand can be bound to one or both of the heavy chains such as at the C-terminus of the CH3 domain. An antigen binding moiety can be a Fab molecule, an scFv molecule, or a peptide.

[0806] An antigen binding moiety can be directed to any specific antigen such as, for example, an antigen expressed on the surface of a tumor cell or in a tumor cell environment, an antigen expressed on an immune cell, an antigen expressed on the surface of a cell expressing predominantly the IL-2Rβ and IL-2Rγc subunits of IL-2R such as CD4+ T-cells, CD8+ T-cells, Tregs, or NK cells.

[0807] Examples of suitable antigen targets expressed on tumor cells include fibroblast activation protein (FAP), the A1 domain of tenascin-C(TNC A1), the A2 domain of tenascin-C(TNC A2), the extradomain B of fibronectin (EDB), carcinoembryonic antigen (CEA), and the melanoma-associated chondroitin sulfate proteoglycan (MCSP).

[0808] Other examples of suitable tumor antigens that can be used for targeting include MAGE, MART-1/Melan-A, gplOO, Dipeptidyl peptidase IV (DPPIV), adenosine deaminase-binding protein (ADAbp), cyclophilin b, Colorectal associated antigen (CRC)-0017-A/GA733, Carcinoembryonic Antigen (CEA) and its immunogenic epitopes CAP-1 and CAP-2, etv6, amll, Prostate Specific Antigen (PSA) and its immunogenic epitopes PSA-1, PSA-2, and PSA-3, prostate-specific membrane antigen (PSMA), T-cell receptor/CD3-zeta chain, MAGE-family of tumor antigens (e.g., MAGE-A1, MAGE-A2, MAGE-A3, MAGE-A4, MAGE-AS, MAGE-A6, MAGE-A7, MAGE-AS, MAGE-A9, MAGE-AlO, MAGE-All, MAGE-A12, MAGE-Xp2 (MAGE-B2), MAGE-Xp3 (MAGE-B3), MAGE-Xp4 (MAGE-B4), MAGE-Cl, MAGE-C2, MAGE-C3, MAGE-C4, MAGE-CS), GAGE-family of tumor antigens such as GAGE-I, GAGE-2, GAGE-3, GAGE-4, GAGE-5, GAGE-6, GAGE-7, GAGE-8, GAGE-9, BAGE, RAGE, LAGE-I, NAG, GnT-V, MUM-1, CDK4, tyrosinase, p53, MUC family, HER2/neu, p2Iras, RCAS1, α-fetoprotein, E-cadherin, α-catenin, -catenin and γ-catenin, p120ctn, gplOO Pmel117, PRAME, NY-ESO-1, cdc27, adenomatous polyposis coli protein (APC), fodrin, Connexin 37, Ig-idiotype, p15, gp75, GM2 and GD2 gangliosides, viral products such as human papilloma virus proteins, Smad family of tumor antigens, Imp-1, PIA, EBY-encoded nuclear antigen (EBNA)-1, brain glycogen phosphorylase, SSX-1, SSX-2 (HOM-MEL-40), SSX-1, SSX-4, SSX-5, SCP-1 and CT-7, and c-erbB-2.

[0809] Examples of viral antigens include influenza virus hemagglutinin, Epstein-Barr virus LMP-1, hepatitis C virus E2 glycoprotein, HIV gp160, and HIV gp120.

[0810] Examples of ECM antigens include syndecan, heparanase, integrins, osteopontin, link, cadherins, laminin, laminin type EGF, lectin, fibronectin, notch, tenascin, and matrixin.

[0811] Targeted IL-2Rβγc ligand fusion proteins can be configured to bind, for example, to a cell surface antigen selected from FAP, Her2, EGFR, IGF-lR, CD2 (T-cell surface antigen), CD3 (heteromultimer associated with the TCR), CD22 (B-cell receptor), CD23 (low affinity IgE receptor), CD30 (cytokine receptor), CD33 (myeloid cell surface antigen), CD40 (tumor necrosis factor receptor), IL-6R (IL6 receptor), CD20, MCSP, and PDGFR (platelet-derived growth factor receptor).

[0812] A targeted IL-2Rβγc ligand construct can comprise an antigen binding moiety capable of binding to an antigen or to a receptor expressed on the surface of a cell by a cell that also expresses IL-2R. Examples of cells expressing IL-2R include, for example, Treg cells, NK cells, CD8+ T-cells, CD4+ T-cells and activated T-cells.

[0813] A targeted IL-2Rβγc ligand construct can comprise an antigen binding moiety capable of binding to an antigen or a receptor expressed by a cell that expresses the IL-2Rβ and IL-2Rγc subunits of IL-2R.

[0814] Examples of cells expressing the IL-2Rβ and IL-2Rγc subunits of IL-2R include, for example, NK cells, CD4+ T-cells, CD8+ T-cells cells, and activated T-cells.

[0815] Examples of antigens expressed on the surface of naïve CD4+ T-cells include include CD4+, CD45RA+, CD45RO−, CCR7+, and CD25.

[0816] Examples of antigens expressed on the surface of CD8+ T-cells include NKG2D, CD8+, CD45RA+, CD450+, CCR7+, and CD28+.

[0817] Examples of antigens expressed on the surface of CD4+ T-cells include Th1 cell markers such as CD4+, CXCR3+, CCR5+, and IL12RD2+; Th2 cell markers such as CD4+, CCR4+, and IL12RD2+; Th9 cell markers such as CD4+, CCR3+, and CCR5+; Th17 cell markers such as CD4+, CCR6+, CCR4+, and NK1.1+; Th22 cell markers such as CD4+, CCR10+, CCR4+, and CCR6+; Treg cell markers such as CD4+, CD127+, CD24+, and CTLA-4+; and Tfh cell markers such as CD4+, CXCR5+, CD40L+, and ICOS+.

[0818] Examples of antigens expressed on the surface of cytotoxic CD8+ T cell include CD8+ and CCR7−.

[0819] Examples of memory T-cell antigens include CCR5, CCR7, CD11a, CD27, CD28, CD45RA, CD45RO, CD57, and/CD62.

[0820] Examples of naïve T-cell antigens include CD45RA, CCR7, CD62L, CD127, and CD132.

[0821] Examples of antigens expressed on the surface of NK cells include TRAIL, CD16, NKp30ab, NKG2C, NKG2D, 2B4, DNAM-1, NKH2A, KIRs, CD137, OX40, CD27, CD16, CD56, CD57, and CD 27.

[0822] A targeted IL-2Rβγc ligand construct can comprise an antigen binding moiety capable of binding to an antigen or receptor expressed on the surface of cells having a role in regulating the immune response.

[0823] Examples of antigens expressed by cells associated with regulating the immune response include PD-1, CTLA-4, CD20, and CD30.

[0824] A targeted IL-2Rβγc ligand construct can comprise an antigen binding moiety capable of binding to an antigen or receptor expressed on the surface of Treg cells such as CD25. For example, a Treg cell-targeted construct can comprise an IL-2Rβγc ligand/daclizumab antibody fusion.

[0825] A dual pharmacology IL-2Rβγc ligand construct provided by the present disclosure can comprise an IL-2Rβγc ligand provided by the present disclosure and a pharmacological moiety. A pharmacological moiety can exert a therapeutic effect on cells expressing IL-2R or on cells other than those expressing IL-2R. One or more IL-2Rβγc ligands can be linked to a biological agent including therapeutic compounds such as, for example, antineoplastic agents, anti-microbial agents, hormones, immunomodulators, and anti-inflammatory agents.

[0826] A dual pharmacology IL-2Rβγc ligand construct can comprise, for example, a protein such as an antibody. An antibody can be an IgA isotype, IgD isotype, IgE isotype, IgG isotype, or IgM isotype. A dual pharmacology IL-2Rβγc ligand construct can comprise an IL-2Rβγc ligand coupled to a pharmacologically active antibody through a linker. The linker can be a naturally occurring molecule or a synthetic molecule.

[0827] A dual pharmacology IL-2Rβγc ligand construct can comprise an antibody having an antigen binding moiety and one or more IL-2Rβγc ligands bound to the Fc chain through an Fc linker.

[0828] An antibody can comprise an antibody directed to a cell-specific antigen. Examples of antibodies directed to cell-specific antigens include alemtuzumab (CD52 antigen), trastuzumab (Her2 protein), ibritumomab tiuxetan (CD20 antigen), brentuximab vedotin (CD30 antigen), ado-trastuzumab emtansine (Her2 protein), blinatumomab (CD19 protein and CD3 protein).

[0829] A dual pharmacology IL-2Rβγc ligand construct can comprise a moiety known to be useful in treating cancer. Examples of monoclonal antibodies known to be useful in treating cancer include alemtuzmab, atezolizumab, avelumab, bevacizumab, brentuximab, cemiplimab cetuximab, trastuzumab, denosumab, rituximab, ipilimumab, nivolumab, obinutuzumab, ofatumumab, panitumumab, pembrolizumab, pertuzumab, rituximab, and trastuzumab.

[0830] A dual pharmacology IL-2Rβγc ligand construct can comprise a moiety known to be a checkpoint inhibitor such as CTLA-4 inhibitors, PD-1 inhibitors, PD-L1, and PD-L2 inhibitors.

[0831] Examples of suitable PD-1 inhibitors include nivolumab, cemiplimab, and pembrolizumab; examples of CTLA-4 inhibitors include ipilimumab; and examples of PD-L1 inhibitors include atezolizumab and durvalumab.

[0832] Examples of monoclonal antibodies useful in treating autoimmune and inflammatory diseases include abciximab, adalimumab, alefacept, alemtuzumab, basiliximab, belimumab, bezlotuxumab, canakinumab, certolizumab, daclizumab, denosumab, efalizumab, golimumab, inflectra, ipilimumab, ixekizumab, natlizumab, nivolumab, olaratumab, amalizumab, palivizumab, panitumumab, pembrolizumab, rituximab, tocilizumab, trastuzumab, secukinumab, and ustekinumab.

[0833] A dual pharmacology IL-2Rβγc ligand antibody construct can comprise an antibody to a checkpoint inhibitor. Antibodies to checkpoint inhibitors include CTLA-4 blockade blocking antibodies, PD-1 inhibitors such as nivolumab, pembrolizumab, and spartalzumab; PD-L1 inhibitors such as alezolizumab; and other antibodies targeting intrinsic checkpoint blockades such as CISH.

[0834] Suitable FDA-approved antibody checkpoint inhibitors include ipilimmab (CTLA-4), nivoliuab (PD-1), pembrolizumab (PD-1), alezolzumab (PD-1), avelumab (PD-1), durvalumab (PD-1), and cemiplimab (PD-1).

[0835] A dual pharmacology IL-2Rβγc ligand construct can comprise a cytokine fusion. An IL-2Rβγc ligand cytokine construct can comprise one or more IL-2Rβγc ligands and one or more cytokines bound to a naturally occurring or synthetic molecule. For examples, one or more IL-2Rβγc ligands and one or more cytokines can be bound to a polypeptide or to a protein such as an IgG or an Fc-fragment. A cytokine can be selected from, for example, an interleukin, a chemokine, a colony-stimulating factor, an interferon, a transforming growth factor, and a tumor necrosis factor.

[0836] An IL-2Rβγc binding construct provided by the present disclosure can comprise a virology construct. An IL-2Rβγc binding virology construct can comprise a ligand provided by the present disclosure to protein expressed on the surface of a virus, an antigen expressed on the surface of a cell targeted by the virus, a cell surface antigen targeted by the virus, or a virus-like particle, or a vaccine.

[0837] Certain IL-2Rβγc ligands and IL-2Rβγc ligand constructs provided by the present disclosure can be synthesized using recombinant DNA technology.

[0838] Certain IL-2Rβγc ligands and IL-2Rβγc ligand constructs provided by the present disclosure can be synthesized using synthetic organic chemistry methods.

[0839] IL-2Rβγc ligands and IL-2Rβγc ligand constructs provided by the present disclosure are agonists of IL-2R.

[0840] An IL-2Rβγc ligand and IL-2Rβγc ligand construct can bind to the IL-2Rβ subunit and/or to the IL-2Rγc subunit of IL-2R and can activate IL-2R. The binding affinity (IC₅₀) of an IL-2Rβγc ligand or IL-2Rβγc ligand construct to the IL-2Rβ subunit and/or to the IL-2Rγc subunit can independently be, for example, less than 100 μM, less than 10 μM, less than 1 μM, less than 100 nM, less than 10 nM, or less than 1 nM.

[0841] The binding affinity (IC₅₀) of an IL-2Rβγc ligand or IL-2Rβγc ligand construct to the IL-2Rβ subunit and/or to the IL-2Rγc subunit can be, for example, less than 100 μM, less than 10 μM, less than 1 μM, less than 100 nM, less than 10 nM, or less than 1 nM. An IL-2Rβγc ligand or IL-2Rβγc ligand construct can bind to the IL-2Rβ subunit and/or to the IL-2Rγc subunit either competitively or non-competitively with IL-2.

[0842] An IL-2Rβγc ligand or IL-2Rβγc ligand construct can be configured to more potently activate cells expressing the IL-2Rβ subunit and the IL-2Rγc subunit, thereby facilitating the ability to differentially activate IL-2R expressed on the surface of different cell types by controlling a dose of an IL-2Rβγc ligand agonist or IL-2Rβγc ligand construct agonist. For example, when incubated with an IL-2Rβγc ligand or an IL-2Rβγc ligand construct, primary human peripheral blood mononuclear cells (PBMC) expressing the IL-2Rβγc subunit phosphorylate signal transducer and activator of transcription 5 (STAT5).

[0843] The EC₅₀ for STAT5 phosphorylation in TF-10 or NK-92 cells induced by an IL-2Rβγc ligand or an IL-2Rβγc ligand construct can be, for example, less than 100 μM, less than 10 μM, less than 1 μM, less than 100 nM, less than 10 nM, or less than 1 nM.

[0844] The EC₅₀ for STAT5 phosphorylation in TF-10 or NK-92 cells induced by an IL-2Rβγc ligand or an IL-2Rβγc ligand construct can be, for example, within a range from 1 μM to 100 μm, from 10 μM to 10 μm, or from 100 μM to 1 μm.

[0845] IL-2Rβγc ligands and IL-2Rβγc ligand constructs provided by the present disclosure can active the STAT5 phosphorylation pathway, the AKT phosphorylation pathway, and the ERK1/2 phosphorylation pathway in NK-92 cells.

[0846] An IL-2Rβγc ligand or IL-2Rβγc ligand construct can partially activate IL-2R. Partial activation refers to a level of activation, that is, for example, less than 75% of maximum activation, less than 50%, less than 25%, less than 10%, or less than 1% of the maximum activation. Maximum activation (Eₘₐₓ) of IL-2R refers to the amplitude of cellular signal (activation) achievable at high agonist concentration such as a high concentration of IL-2. Partial IL-2R agonists can be effective in modulating the levels of response of IL-2R to activation of the IL-2Rβ and IL-2Rγc subunits among different cell types expressing IL-2R. For example, different cell types are known to vary in expression levels of each of the IL-2R subunits, IL-2Rα, IL-2RO, and IL-2Rγc, and to exhibit different sensitivities to IL-2R agonists.

[0847] An IL-2Rβγc ligand or IL-2Rβγc ligand construct can comprise modified IL-2Rβ ligands and/or IL-2Rγc ligands. Modified IL-2Rβ and IL-2Rγc ligands can be selected or designed to bind and activate IL-2R, but with low or modest affinity and potency to IL-2R. Such IL-2Rβγc ligands and IL-2Rβγc ligand constructs can have greater differential sensitivity for IL-2R activation between cells that highly express IL-2Rα and cells having a low level of IL-2Rα expression; for example, between Tregs that have a high expression of IL-2Rα and Teff cells that have a low expression level of IL-2Rα.

[0848] IL-2Rβγc ligands and IL-2Rβγc ligand constructs provided by the present disclosure can act as full IL-2R agonists, partial IL-2R agonists, biased IL-2R agonists, or pH-biased IL-2R agonists.

[0849] As shown in Example 8, in NK-92 cells, the IL-2Rβγc ligand (BGL21) acts as a full agonist comparable to IL-2 with respect to STAT5 phosphorylation, AKT phosphorylation and ERK1/2 phosphorylation in NK-92 cells.

[0850] As shown in Examples 3-6 and corresponding FIGS. 2-5B, other IL-2Rβγc ligands provided by the present disclosure exhibit a STAT5 phosphorylation activity in TF-1β cells that is less than that of IL-2Rβγc ligand (BGL21) and can be considered partial agonists with respect to the STAT5 phosphorylation in TF-1β cells.

[0851] As shown in Example 9, with respect to STAT5 phosphorylation in resting CD8 T-cells, resting Treg cells and resting CD4 T-cells, IL-2Rβγc ligand (BGL21) exhibits non-selective agonist activity of around 1E-9 (EC₅₀) across the different cell types. In contrast, the EC₅₀ for IL-2 varies by about two (2) orders of magnitude and exhibits a high selectivity for STAT5 phosphorylation in resting Treg cells.

[0852] Similar effects are observed for IL-2Rβγc ligand constructs where agonist activity as determined by STAT5 phosphorylation in TF-1β cells was modified depending on the IL-2Rβγc ligand, the construct linker, the construct partner, and the binding location on the construct partner.

[0853] IL-2Rβγc ligands and IL-2Rβγc ligand constructs provided by the present disclosure can act as IL-2R antagonist. An IL-2Rβγc ligand antagonist and IL-2Rβγc ligand construct antagonist provided by the present disclosure can bind to IL-2R with an IC₅₀, for example, of less than 100 μM, less than 10 μM, less than 1 μM, less than 0.1 μM, or less than 0.01 μM and exhibits no detectable functional activity as determined, for example, using any of the functional assays disclosed in the examples such as the STAT5 phosphorylation assay.

[0854] IL-2Rβγc binding compounds provided by the present disclosure can be useful when combined with certain vaccines, including cancer neo-antigen vaccines. Mutations in tumor DNA produces new protein sequences that are foreign to the body. Vaccines can be designed to specifically activate a patient's immune system with respect to tumor-specific neoantigens. When administered in combination with a neo-antigen vaccine, IL-2Rβγc binding compounds provided by the present disclosure can expand and proliferate neo-antigen-specific T-cells in the tumor microenvironment and thereby drive maximal expansion of vaccine-induced neoantigen-specific T-cells for the treatment of cancer.

[0855] For example, bempegaldesleukin (NKTR-214), reported to be a biased IL-2Rβγc agonist, was combined with neo-antigen vaccine VB10.NEO in a preclinical tumor model. Synergistic effects on neoantigen-specific T-cell responses were observed. The synergistic effect was also observed in both CD4 and CD8 T-cells with the most pronounced effects on CD8 T-cells. The neo-antigen vaccine VB10.NEO in combination with NKTR-214 and anti-PD-1 induced rapid and durable tumor regression of small tumors and long-lasting stabilization of large tumors. The combination of NKTR-214 and neo-antigen vaccine VB10.NEO is currently being studied in a human trial.

[0856] As another example, a complex of an IL-15 mutant and an Fc-fusion of the IL-15Ra subunit (ALT-803) of IL-15R, which is reported to be an IL-2Rβγ agonist, was co-administered intravascularly with Bacillus Calmette-Gudrin (BCG), an immune stimulant, and a vaccine for tuberculosis, in a carcinogen-induced rat non-muscle invasive bladder cancer (NMIBC) model. As a single treatment agent, ALT-803 reduced tumor burden by 35% compared to control whereas BCG alone only reduced the tumor burden by 15%. The combination of ALT-803 and BCG reduced tumor burden by 46% compared to control. The combination is currently being studied in human clinical trials.

[0857] Thus, IL-2Rβγc ligands and IL-2Rβγc constructs provided by the present disclosure can be used as adjuvants. An adjuvant refers to a compound that enhances the efficacy of a vaccine without directly participating in the protective immunity. For example, an IL-2Rβγc binding compound provided by the present disclosure can be used in conjunction with a cancer vaccine.

[0858] IL-2Rβγc ligands and IL-2Rβγc ligand constructs provided by the present disclosure can be useful for cell therapy when engineered to be expressed on the membrane surface of cells that also express the IL-2Rβγc subunits. Adoptive immunotherapy using NK cells or using re-targeted chimeric antigen receptor (CAR) T-cells is currently being studied as a treatment for neoplasms and viral infections. One challenge with these cell therapies is the suboptimal sustained survival of the infused cells.

[0859] DNA encoding an IL-2Rβγc ligand fused to a membrane protein in such a way that the IL-2Rβγc ligand is expressed on the extracellular surface of a cell can be constructed using standard techniques. When the fusion protein comprising the IL-2Rβγc ligand is expressed, IL-2 receptors on the cell become activated leading to long-term persistence of the cell.

[0860] As an example, a novel chimeric IL-2/IL-2Rβ fusion protein of IL-2 and its receptor subunit, IL-2Rβ, joined via a peptidyl linker (CIRB) has been reported. NK-92 cells expressing CIRB (NK-92CIRB) were highly activated and expanded indefinitely without exogenous IL-2. When compared with an IL-2-secreting NK-92 cell line, NK-92^{CIRB} cells were more activated, cytotoxic, and resistant to growth inhibition than were NK-92 cells. In the presence of cancer cells, NK-92cIRB cells exhibited enhanced cytotoxicity resulting in superior in vivo antitumor effects in mice.

[0861] As another example, co-expression of both a CAR and membrane-bound chimeric IL-15 (mbIL15) has been reported. IL-15 is known to act by activating IL-2Rβγc. The mbIL15-CAR T-cells showed T-cell persistence independent of CAR signaling and achieved potent rejection of CD19⁺ leukemia in an animal model. Long-lived T-cells possessed a memory-like transcriptional profile. The results demonstrated that CAR+ T-cells can be developed long-term persistence with a memory stem-cell phenotype sustained by signaling through mbIL15.

[0862] DNA encoding an IL-2Rβγc ligand can be incorporated into a cell and can be configured to produce an IL-2Rβγc ligand provided by the present disclosure. The IL-2Rβγc ligand can be secreted from the cell and can interact with the secreting cells (i.e., autocrine signaling) and/or cells in the vicinity of the secreting cell (i.e., paracrine signaling). A secreted IL-2Rβγc ligand or IL-2Rβγc ligand construct provided by the present disclosure can be an IL-2R agonist and can be designed to localize near the secreting cell.

[0863] An IL-2Rβγc ligand or IL-2Rβγc ligand construct provided by the present disclosure can be used to expand non-regulatory T-cells within a patient or within a biological sample. Methods of increasing the ratio of non-regulatory T-cells to Treg cells can comprise contacting a population of T-cells with an effective amount of an IL-2Rβγc ligand or IL-2Rβγc ligand construct. The ratio can be measured by determining the ratio of CD3+FOXP3+ cells to CD3+FOXP3-cells within the population of T-cells. A typical Treg frequency in human blood is 5% to 10% of the total CD4+CD3+ T-cells, however, in certain diseases this percentage may be lower or higher.

[0864] An IL-2Rβγc ligand or IL-2Rβγc ligand construct may be used to expand NK cells. NK cells modified with chimeric antigen receptors (CARs), which redirect immune cell activity to target cancer cells have been demonstrated to exhibit improved antitumor responses. CARs can comprise an antibody-derived extracellular domain, which binds to the desired tumor-associated antigen (TAA) and triggers an intracellular signaling cascade to activate the immune cell against the target cells.

[0865] NK cells can be genetically engineered for enhanced expression of one or more tumor targeting receptors such as NKG2D with membrane-bound IL-2Rβγc ligand, which can prolong the persistence and potency of the NK cells.

[0866] CAR T-cells can be genetically engineered to co-express a tethered form of an IL-2Rβγc ligand provided by the present disclosure to support in vivo persistence and maintenance of an immature state of differentiation and to exhibit in vivo antitumor activity.

[0867] IL-2Rβγc binding compounds, i.e., IL-2Rβγc ligands, tandem IL-2Rβγc ligands, and IL-2Rβγc ligand constructs provided by the present disclosure, can be incorporated into pharmaceutical compositions to be administered to a patient by any appropriate route of administration including intradermal, intramuscular, intraperitoneal, intravenous, subcutaneous, intranasal, epidural, oral, peroral, sublingual, intracerebral, intravaginal, transdermal, rectal, inhalation, or topical. A pharmaceutical composition provided by the present disclosure can be an injectable formulation. Pharmaceutical compositions provided by the present disclosure can be injectable intravenous formulations. Pharmaceutical compositions provided by the present disclosure can be oral formulations. Oral formulations may be oral dosage forms. A pharmaceutical composition may be formulated for intravenous administration or for subcutaneous administration.

[0868] Pharmaceutical compositions provided by the present disclosure may comprise a therapeutically effective amount of an IL-2Rβγc binding compound together with a suitable amount of one or more pharmaceutically acceptable vehicles so as to provide a composition for proper administration to a patient. Suitable pharmaceutical vehicles and methods of preparing pharmaceutical compositions are described in the art.

[0869] Assessing single patient response to therapy and qualifying a patient for optimal therapy are among the greatest challenges of modem healthcare and relate to trends in personalized medicine. IL-2Rβγc binding compounds can have target selectivity, for example, for certain cancers and immune cells. IL-2Rβγc binding compounds radiolabeled for positron emission tomography (PET) or Single Photon Emission Computed Tomography (SPECT) can be used to predict the targeting of the treatment based on a single-study, case-by-case patient analysis thus excluding patients that are expected not to benefit from treatment. PET/SPECT scans using IL-2Rβγc binding compounds, once correlated to the concentration can provide a three-dimensional distribution map, which can then be used for macroscopic dose calculations.

[0870] Accordingly, it is within the capability of those of skill in the art to assay and use IL-2Rβγc binding compounds and/or pharmaceutical compositions thereof for therapy.

[0871] IL-2Rβγc binding compounds, and/or pharmaceutical composition thereof can generally be used in an amount effective to achieve the intended purpose. For use to treat a disease such as cancer, an autoimmune disease or an inflammatory disease, an IL-2Rβγc binding compound, and/or pharmaceutical composition thereof, may be administered or applied in a therapeutically effective amount.

[0872] The amount of an IL-2Rβγc binding compound, and/or pharmaceutical composition of any of the foregoing that will be effective in the treatment of a particular disorder or condition disclosed herein will depend in part on the nature of the disorder or condition, and can be determined by standard clinical techniques known in the art. In addition, in vitro or in vivo assays may optionally be employed to help identify optimal dosage ranges. The amount of an IL-2Rβγc binding compound, and/or pharmaceutical composition of any of the foregoing administered will depend on, among other factors, the patient being treated, the weight of the patient, the severity of the affliction, the manner of administration and the judgment of the prescribing physician.

[0873] An IL-2Rβγc binding compound can be assayed in vitro and in vivo, for the desired therapeutic activity, prior to use in humans. For example, in vitro assays may be used to determine whether administration of a specific compound or a combination of compounds is preferred. The compounds can also be demonstrated to be effective and safe using animal model systems.

[0874] In certain embodiments, a therapeutically effective dose of an IL-2Rβγc binding compound, and/or pharmaceutical composition of any of the foregoing will provide therapeutic benefit without causing substantial toxicity. Toxicity of an IL-2Rβγc binding compound, and/or pharmaceutical compositions of any of the foregoing may be determined using standard pharmaceutical procedures and may be readily ascertained by the skilled artisan. The dose ratio between toxic and therapeutic effect is the therapeutic index. An IL-2Rβγc binding compound, and/or pharmaceutical composition of any of the foregoing exhibits a particularly high therapeutic index in treating disease and disorders. A dose of an IL-2Rβγc binding compound, and/or pharmaceutical composition of any of the foregoing will be within a range of circulating concentrations that include an effective dose with minimal toxicity.

[0875] An IL-2Rβγc binding compounds provided by the present disclosure or a pharmaceutical composition thereof may be included in a kit that may be used to administer the compound to a patient for therapeutic purposes. A kit may include a pharmaceutical composition comprising an IL-2Rβγc binding compounds provided by the present disclosure suitable for administration to a patient and instructions for administering the pharmaceutical composition to the patient. The kit can be a kit for treating cancer, for treating an autoimmune disease, or for treating an inflammatory disease. A kit for use in treating cancer in a patient can comprise an IL-2Rβγc binding compound provided by the present disclosure, a pharmaceutically acceptable vehicle for administering the compound, and instructions for administering the compound to a patient.

[0876] The pharmaceutical compositions can be included in a container, pack, or dispenser together with instructions for administration.

[0877] Instructions supplied with a kit may be printed and/or supplied, for example, as an electronic-readable medium, a video cassette, an audiotape, a flash memory device, or may be published on an internet web site or distributed to a patient and/or health care provider as an electronic communication.

[0878] An IL-2Rβγc binding compound provided by the present disclosure can be useful when combined with certain vaccines, including cancer neo-antigen vaccines. Mutations in tumor DNA produces new protein sequences that are foreign to the body. Vaccines can be designed to specifically activate a patient's immune system with respect to tumor-specific neo-antigens. When administered in combination with a neo-antigen vaccine, an IL-2Rβγc binding compound provided by the present disclosure can expand and proliferate neo-antigen-specific T-cells in the tumor microenvironment and thereby drive maximal expansion of vaccine-induced neo-antigen-specific T-cells for the treatment of cancer.

[0879] An IL-2Rβγc binding compound provided by the present disclosure can be used as an adjuvant. An adjuvant refers to a compound that enhances the efficacy of a vaccine without directly participating in the protective immunity. For example, an IL-2Rβγc binding compound provided by the present disclosure can be used in conjunction with a cancer vaccine or a viral vaccine.

[0880] An IL-2Rβγc binding compound provided by the present disclosure can be useful for cell therapy when engineered to be expressed on the membrane surface of cells that also express the IL-2Rβ and Rye subunits. Adoptive immunotherapy using NK cells or using re-targeted chimeric antigen receptor (CAR) T-cells is currently being studied as a treatment for neoplasms and viral infections. One challenge with these cell therapies is the suboptimal sustained survival of the infused cells.

[0881] DNA encoding a ligand fused to a membrane protein in such a way that the IL-2Rβγc binding compound is expressed on the extracellular surface of a cell can be constructed using standard techniques. When a fusion protein comprising an IL-2Rβγc ligand and/or an IL-2Rβγc ligand is expressed, IL-2 receptors on the cell become activated leading to long-term persistence of the cell.

[0882] DNA encoding a ligand can be incorporated into a cell and can be configured to produce an IL-2Rβγc binding compound provided by the present disclosure. An IL-2Rβγc binding compound can be secreted from the cell and can interact with the secreting cells (i.e., autocrine signaling) and/or cells in the vicinity of the secreting cell (i.e., paracrine signaling). A secreted IL-2Rβγc binding compound provided by the present disclosure can be an IL-2R agonist and can be designed to localize near the secreting cell.

[0883] An IL-2Rβγc binding compound provided by the present disclosure can be used to expand T-cells within a patient or within a biological sample. Methods of increasing the ratio of non-regulatory T-cells to Treg cells can comprise contacting a population of T-cells with an effective amount of an IL-2Rβγc binding compound. The ratio can be measured by determining the ratio of CD3+FOXP3+ cells to CD3+FOXP3− cells within the population of T-cells. A typical Treg frequency in human blood is 5% to 10% of the total CD4+CD3+ T-cells, however, in certain diseases this percentage may be lower or higher.

[0884] An IL-2Rβγc binding compound may be used to expand T-cells. T-cells modified with chimeric antigen receptors (CARs), which redirect immune cell activity to target cancer cells have been demonstrated to exhibit improved antitumor responses. CARs can comprise an antibody-derived extracellular domain, which binds to the desired tumor-associated antigen (TAA) and triggers an intracellular signaling cascade to activate the immune cell against the target cells.

[0885] An IL-2Rβγc binding compound that are immobilized to a surface can be exposed to populations of T-cells in vitro or ex vivo to induce expansion of the cell population. Prior to transfer to a patient. CAR-T cells can be expanded by exposure to an immobilized form of an IL-2Rβγc binding compound. An immobilized an IL-2Rβγc binding compound can be separated from the CAR-T cells prior to transfer of the CAR-T cells to a patient.

[0886] CAR T-cells can be genetically engineered to co-express a tethered form of an IL-2Rβγc binding compound provided by the present disclosure to support in vivo persistence and maintenance of an immature state of differentiation and to exhibit in vivo antitumor activity.

[0887] Assessing single patient response to therapy and qualifying a patient for optimal therapy are among the greatest challenges of modern healthcare and relate to trends in personalized medicine. An IL-2Rβγc binding compound can have target selectivity, for example, for certain cancers and immune cells. An IL-2Rβγc binding compound radiolabeled for positron emission tomography (PET) or Single Photon Emission Computed Tomography (SPECT) can be used to predict the targeting of the treatment based on a single-study, case-by-case patient analysis thus excluding patients that are expected not to benefit from treatment. PET/SPECT scans using IL-2Rβγc binding compounds, once correlated to the concentration can provide a three-dimensional distribution map, which can then be used for dose calculations.

[0888] An IL-2Rβγc binding compound can comprise one or more imaging agents. An IL-2Rβγc binding compound can direct and localize the compound to cells, populations of cells, and tissue expressing IL-2R. The imaging compounds can comprise one or more imaging agents such as radiolabels, fluorescent labels, enzymatic labels, or PET imaging agents.

[0889] The imaging agents can be used to determine the number of cells expressing IL-2R, the expression level of cells expressing IL-2R, or properties of IL-2R such as the binding affinity of a particular IL-2Rβγc binding compound to IL-2R. The imaging agents can be used, for example, to evaluate cancer cells expressing the IL-2Rβ subunit and the Rγc subunit, or to evaluate Treg and/or Teff cells.

[0890] The label can be detected to determine a biodistribution of the compound in a patient or to assess the potential for therapeutic efficacy. For example, tumors expressing high levels of IL-2R may be attractive targets for therapeutic IL-2Rβγc binding compounds provided by the present disclosure.

[0891] The imaging agents can be used to evaluate cells expressing IL-2R before therapy, during therapy, and/or following therapy.

[0892] Imaging agents comprising a ligand can further comprise a moiety capable of binding to a cell surface and in particular to a protein expressed on the cell surface. The protein can be indicative of a certain cell type and is referred to as a cell surface marker. Imaging agents comprising both a ligand and a cell surface marker can be used to assess cells, a population of cells, and/or a tissue expressing IL-2R and the cell surface marker. Assessment can include determining the number of cells expressing IL-2R and the cell surface marker, the expression levels of IL-2R and the cell surface marker, and/or the binding affinity of the imaging agent to IL-2R and/or to the cell surface marker.

[0893] The imaging agents can be used to evaluate cells expressing IL-2R and the cell surface marker before therapy, during therapy, and/or following therapy.

[0894] An IL-2Rβγc binding compound provided by the present disclosure can be labeled. Labeled compounds can be useful in diagnostics.

[0895] An IL-2Rβγc binding compound provided by the present disclosure can be labeled with a detectable marker. The label can be used to determine a biodistribution of the compound in a patient or to assess the potential for therapeutic efficacy. For example, tumors expressing high levels of IL-2R may be attractive targets for selective IL-2R agonists and IL-2Rβγc binding compounds provided by the present disclosure.

[0896] An IL-2Rβγc binding compound provided by the present disclosure include labeled compounds. A labeled compound can be a detectable marker, for example, a radiolabeled amino acid or an attachment of biotinyl moieties to a polypeptide, wherein the attached biotinyl moieties can be detected by marked avidin such as streptavidin containing a fluorescent marker or enzymatic activity that can be detected by optical or colorimetric methods. Various methods of labeling polypeptides and glycoproteins are known in the art and may be used. Examples of labels for polypeptides include, for example, a radioisotope such as, ³H, ⁴C, ³⁵S, ¹²⁵I, and ¹³¹I, a fluorescent labels such as FITC, rhodamine, and lanthanide phosphors, an enzymatic label such as horseradish peroxidase, β-galactosidase, luciferase, and alkaline phosphatase, biotinyl groups, predetermined polypeptide epitopes recognized by a secondary reporter such as leucine zipper pair sequences, binding sites for secondary antibodies, metal ligands, and epitope tags. A label can be attached by spacer arms of various lengths to reduce potential steric hindrance.

[0897] An IL-2Rβγc binding compound provided by the present disclosure can be used, for example, to treat diseases such as cancer, an inflammatory disease, an autoimmune disease, an immunodeficiency or an infectious disease, including a viral disease such as COVID-19.

[0898] An IL-2Rβγc binding compound provided by the present disclosure and pharmaceutical compositions of any of the foregoing may be administered to a patient to treat an organ transplant.

[0899] An IL-2Rβγc binding compound provided by the present disclosure and pharmaceutical compositions of any of the foregoing may be administered to a patient together with another compound for treating an inflammatory disease or an autoimmune disease in the subject. The at least one other therapeutic agent may be an IL-2Rβγc binding compound provided by the present disclosure. An IL-2Rβγc binding compound and the at least one other therapeutic agent may act additively or synergistically. The at least one additional therapeutic agent may be included in the same pharmaceutical composition or vehicle comprising the IL-2Rβγc binding compound or may be in a separate pharmaceutical composition or vehicle. Accordingly, methods provided by the present disclosure further include, in addition to administering an IL-2Rβγc binding compound, administering one or more therapeutic agents effective for treating an inflammatory disease or an autoimmune disease or a different disease, disorder or condition than an inflammatory disease or an autoimmune disease. Methods provided by the present disclosure include administration of an IL-2Rβγc binding compound and one or more other therapeutic agents provided that the combined administration does not inhibit the therapeutic efficacy of an IL-2Rβγc binding compound and/or does not produce adverse combination effects.

[0900] An IL-2Rβγc binding compound provided by the present disclosure comprise treating a disease in a patient such as cancer, an inflammatory disease, or an autoimmune disease comprising administering to a patient in need thereof a therapeutically effective amount of a compound capable of binding to the specific binding site of the IL-2Rβ subunit and/or the Rγc subunit of IL-2R with an IC₅₀ of less than 100 μM, less than 10 μM, less than 1 μM, less than 100 nM, or less than 10 nM.

[0901] IL-2Rβγc binding compounds provided by the present disclosure may be used for treating cancer in a patient. The cancer can be, for example, a solid tumor or a metastasis.

[0902] IL-2Rβγc binding compounds provided by the present disclosure or a pharmaceutical composition thereof may be administered to treat a cancer known to be treated by activation of IL-2R.

[0903] IL-2Rβγc binding compounds provided by the present disclosure or a pharmaceutical composition thereof may be administered to treat a cancer known to be treated by activation of the IL-2Rβγc subunits and where simultaneous activation of the IL-2Rα subunit compromises therapeutic efficacy and/or induces unwanted side effects.

[0904] IL-2Rβγc binding compounds provided by the present disclosure or pharmaceutical compositions thereof can be used to treat, for example, one or more of the following cancers: acute lymphoblastic leukemia, acute myeloid leukemia, adrenocortical carcinoma, appendix cancer, astrocytoma, atypical teratoid/rhabdoid tumor, basal cell carcinoma (nonmelanoma), B-cell lymphoma, bladder cancer, bone cancer, brain and spinal cord tumors, brain stem cancer, brain tumor, breast cancer, bronchial tumors, Burkitt lymphoma, carcinoid tumor, carcinoma of head and neck, central nervous system embryonal tumors, cerebellar astrocytoma, cerebral astrocytoma/malignant glioma, cervical cancer, chordoma, chronic lymphocytic leukemia, chronic myelogenous leukemia, colorectal cancer, craniopharyngioma, cutaneous T-cell lymphoma, desmoplastic small round cell tumor, ductal carcinoma, dye cancer, endocrine pancreas tumors (islet cell tumors), endometrial cancer, ependymoblastoma, esophageal cancer, esthesioneuroblastoma, Ewing family of tumors, extracranial germ cell tumor, extrahepatic bile duct cancer, gallbladder cancer, gastric cancer, gastrointestinal carcinoid tumor, gastrointestinal stromal tumor, gestational trophoblastic tumor, glioblastoma, glioma, hairy cell leukemia, head and neck cancer, heart cancer, hematopoetic tumors of the lymphoid lineage, hepatocellular cancer, Hodgkin lymphoma, hypopharyngeal cancer, hypothalamic and visual pathway glioma, IDs-related lymphoma, intraocular melanoma, islet cell tumors, Kaposi sarcoma, kidney cancer, Langerhans cell histiocytosis, laryngeal cancer, leukemia, lip and oral cavity cancer, male breast cancer, malignant fibrous histiocytoma, malignant germ cell tumors, malignant mesothelioma, medulloblastoma, melanoma, Merkel cell carcinoma, mesothelioma, mouth cancer, multiple endocrine neoplasia syndrome, multiple myeloma, mycosis fungoides, myelodysplastic, myeloproliferative neoplasms, nasal cavity and paranasal sinus cancer, nasopharyngeal cancer, neuroblastoma, non-Hodgkin lymphoma, non-small cell lung cancer, oral cancer, oropharyngeal cancer, osteosarcoma, ovarian cancer, ovarian epithelial cancer, ovarian germ cell tumor, ovarian low malignant potential tumor, pancreatic cancer, pancreatic neuroendocrine tumors (islet cell tumors), papillomatosis, paraganglioma, paranasal sinus and nasal cavity cancer, parathyroid cancer, penile cancer, pharyngeal cancer, pheochromocytoma, pineal parenchymal tumors, pineoblastoma and supratentorial primitive neuroectodermal tumors, pituitary tumor, plasma cell neoplasm/multiple myeloma, pleuropulmonary blastoma, pregnancy and breast cancer, primary central nervous system lymphoma, primary liver cancer, primary metastatic squamous neck cancer with occult, prostate cancer, rectal cancer, renal cell cancer, renal pelvis and ureter, respiratory tract carcinoma, retinoblastoma, rhabdomyosarcoma, salivary gland cancer, sarcoma, Sézary syndrome, skin cancer, small intestine cancer, soft tissue sarcoma, squamous cell carcinoma (nonmelanoma), stomach cancer, supratentorial primitive neuroectodermal tumors, T-cell lymphoma, testicular cancer, throat cancer, thymoma and thymic carcinoma, thyroid cancer, transitional cell cancer, urethral cancer, uterine sarcoma, vaginal cancer, visual pathway and hypothalamic glioma, vulvar cancer, Waldenström macroglobulinemia, Wilms tumor, and systemic and central metastases of any of the foregoing.

[0905] IL-2Rβγc binding compounds provided by the present disclosure or pharmaceutical compositions thereof can be used to treat solid tumors.

[0906] IL-2Rβγc binding compounds provided by the present disclosure or pharmaceutical compositions thereof can be used to treat tumor metastases.

[0907] IL-2Rβγc binding compounds provided by the present disclosure or pharmaceutical compositions thereof can be used to treat circulating tumor cells.

[0908] IL-2Rβγc binding compounds provided by the present disclosure or pharmaceutical compositions thereof can be used to treat, for example, a cancer selected from primary adult and childhood brain and CNS cancers including glioblastoma (GBM) and astrocytoma, skin cancers including melanoma, lung cancers including small cell lung cancers, non-small cell lung cancers (NSCLC), and large cell lung cancers, breast cancers including triple negative breast cancer (TNBC), blood cancers including myelodysplastic syndrome (MDS), multiple myeloma (MM), and acute myeloid leukemia (AML), prostate cancer including castrate resistant prostate cancer (CRPC), liver cancers including hepatocellular carcinoma (HCC), esophageal and gastric cancers, and any systemic and central metastases of any of the foregoing.

[0909] The amount of an IL-2Rβγc binding compound provided by the present disclosure, or pharmaceutical composition thereof that will be effective in the treatment of a cancer can depend, at least in part, on the nature of the disease, and may be determined by standard clinical techniques known in the art. In addition, in vitro or in vivo assays may be employed to help identify optimal dosing ranges. Dosing regimens and dosing intervals may also be determined by methods known to those skilled in the art. The amount of an IL-2Rβγc binding compound provided by the present disclosure administered may depend on, among other factors, the patient being treated, the weight of the patient, the severity of the disease, the route of administration, and the judgment of the prescribing physician.

[0910] For systemic administration, a therapeutically effective dose may be estimated initially from in vitro assays. Initial doses may also be estimated from in vivo data, e.g., animal models, using techniques that are known in the art. Such information may be used to more accurately determine useful doses in humans. One having ordinary skill in the art may optimize administration to humans based on animal data.

[0911] A dose of an IL-2Rβγc binding compound provided by the present disclosure and appropriate dosing intervals may be selected to maintain a sustained therapeutically effective concentration of the IL-2Rβγc binding compound provided by the present disclosure in the blood of a patient, and in certain embodiments, without exceeding a minimum adverse concentration.

[0912] A pharmaceutical composition comprising an IL-2Rβγc binding compound provided by the present disclosure may be administered, for example once per week, every 2 weeks, every 3 weeks, every 4 weeks, every 5 weeks, or every 6 weeks. Dosing may be provided alone or in combination with other drugs and may continue as long as required for effective treatment of the disease. Dosing may also be undertaken using continuous or semi-continuous administration over a period of time. Dosing includes administering a pharmaceutical composition to a mammal, such as a human, in a fed or fasted state.

[0913] A pharmaceutical composition may be administered in a single dosage form or in multiple dosage forms or as a continuous or an accumulated dose over a period of time. When multiple dosage forms are used the amount of an IL-2Rβγc binding compound provided by the present disclosure contained within each of the multiple dosage forms may be the same or different.

[0914] Suitable daily dosage ranges for administration can range, for example, from about 2 pg to about 200 mg of an IL-2Rβγc binding compound provided by the present disclosure per kilogram body weight.

[0915] Suitable daily dosage ranges for administration may range, for example, from about 1 pg to about 50 mg of an IL-2Rβγc binding compound provided by the present disclosure per square meter (m²) of body surface.

[0916] An IL-2Rβγc binding compound provided by the present disclosure may be administered to treat cancer in a patient in an amount, for example, from 0.001 mg/day to 100 mg/day, or in any other appropriate daily dose. A dose can be, for example, from 0.01 pg/kg body weight/week to 100 pg/kg body weight/week or any other suitable dose.

[0917] A pharmaceutical composition comprising an IL-2Rβγc binding compound provided by the present disclosure may be administered to treat cancer in a patient so as to provide a therapeutically effective concentration of an IL-2Rβγc binding compound provided by the present disclosure in the blood or plasma of the patient. A therapeutically effective concentration of a compound of an IL-2Rβγc binding compound provided by the present disclosure in the blood of a patient can be, for example, from 0.01 μg/L to 1,000 μg/L, from 0.1 μg/L to 500 μg/L, from 1 μg/L to 250 μg/L, or from about 10 μg/L to about 100 μg/L. A therapeutically effective concentration of an IL-2Rβγc binding compound provided by the present disclosure in the blood of a patient can be, for example, at least 0.01 μg/L, at least 0.1 μg/L, at least 1 μg/L, at least about 10 μg/L, or at least 100 μg/L. A therapeutically effective concentration of an IL-2Rβγc binding compound in the blood of a patient can be, for example, less than an amount that causes unacceptable adverse effects including adverse effects to homeostasis. A therapeutically effective concentration of an IL-2Rβγc binding compound in the blood of a patient can be an amount sufficient to restore and/or maintain homeostasis in the patient.

[0918] Pharmaceutical compositions comprising an IL-2Rβγc binding compound may be administered to treat a disease in a patient so as to provide a therapeutically effective concentration of the IL-2Rβγc binding compound in the blood of a patient for an extended period of time such as, for example, for at least 1 day, for at least 1 week, at least 2 weeks, at least 4 weeks, at least 5 week, or at least 6 weeks.

[0919] The amount of an IL-2Rβγc binding compound administered may vary during a treatment regimen.

[0920] Pharmaceutical compositions provided by the present disclosure may further comprise one or more pharmaceutically active compounds in addition to an IL-2Rβγc binding compound provided by the present disclosure. Such compounds may be provided, for example, to treat the cancer being treated with the IL-2Rβγc binding compound or to treat a disease, disorder, or condition other than the cancer being treated with the IL-2Rβγc binding compound, to treat a side-effect caused by administering the IL-2Rβγc binding compound, to augment the efficacy of the IL-2Rβγc binding compound, and/or to modulate the activity of the IL-2Rβγc binding compound.

[0921] An IL-2Rβγc binding compound provided by the present disclosure may be used in combination with at least one other therapeutic agent. An IL-2Rβγc binding compound may be administered to a patient together with another compound for treating cancer in the patient. The at least one other therapeutic agent can be a second, different IL-2Rβγc binding compound. An IL-2Rβγc binding compound and the at least one other therapeutic agent may act additively or, and in certain embodiments, synergistically with another IL-2Rβγc binding compound. The at least one additional therapeutic agent may be included in the same pharmaceutical composition or vehicle comprising the IL-2Rβγc binding compound or may be in a separate pharmaceutical composition or vehicle. Accordingly, methods provided by the present disclosure further include, in addition to administering an IL-2Rβγc binding compound, administering one or more therapeutic agents effective for treating cancer or a different disease, disorder or condition than cancer. Methods provided by the present disclosure include administration of an IL-2Rβγc binding compound and one or more other therapeutic agents provided that the combined administration does not inhibit the therapeutic efficacy of the IL-2Rβγc binding compound and/or does not produce adverse combination effects.

[0922] A pharmaceutical composition comprising an IL-2Rβγc binding compound may be administered concurrently with the administration of another therapeutic agent, which may be part of the same pharmaceutical composition as, or in a different pharmaceutical composition than that comprising an IL-2Rβγc binding compound. An IL-2Rβγc binding compound may be administered prior or subsequent to administration of another therapeutic agent. In certain combination therapies, the combination therapy may comprise alternating between administering an IL-2Rβγc binding compound and a composition comprising another therapeutic agent, e.g., to minimize adverse drug effects associated with a particular drug. When an IL-2Rβγc binding compound is administered concurrently with another therapeutic agent that potentially may produce an adverse drug effect including, for example, toxicity, the other therapeutic agent may be administered at a dose that falls below the threshold at which the adverse drug reaction is elicited.

[0923] A pharmaceutical composition comprising an IL-2Rβγc binding compound provided by the present disclosure may be administered with one or more substances, for example, to enhance, modulate and/or control release, bioavailability, therapeutic efficacy, therapeutic potency, and/or stability, of the IL-2Rβγc binding compound. For example, a pharmaceutical composition comprising an IL-2Rβγc binding compound can be co-administered with an active agent having pharmacological effects that enhance the therapeutic efficacy of the IL-2Rβγc binding compound.

[0924] An IL-2Rβγc binding compound, or a pharmaceutical composition thereof may be administered in conjunction with an agent known or believed to be effective in treating a disease such as cancer, an autoimmune disease or an inflammatory disease in a patient, such as the same disease being treated with the IL-2Rβγc binding compound.

[0925] An IL-2Rβγc binding compound, or a pharmaceutical composition thereof may be administered in conjunction with an agent known or believed to interfere with cell proliferation.

[0926] An IL-2Rβγc binding compound, or a pharmaceutical composition thereof may be administered in conjunction with an agent known or believed to interfere with cellular metabolism, to be an anti-metabolite, to interfere with RNA transcription, to interfere with RNA translation, to interfere with cellular protein synthesis, to interfere with synthesis of precursors for DNA synthesis and replication, to interfere with purine synthesis, to interfere with nucleoside synthesis, to interact with mTOR, to be an mTOR inhibitor, to interfere with cell cycle checkpoints.

[0927] An IL-2Rβγc binding compound or a pharmaceutical composition thereof may be administered in conjunction with a checkpoint inhibitor including a CTLA-4 inhibitor such as ipilimumab, a PD-1 inhibitor such as pembrolizumab and nivolumab, and/or a PD-LI inhibitor such as atezolizumab, avelumab, and durvalumab. An IL-2Rβγc binding compound or a pharmaceutical composition thereof may be administered in conjunction with an immunomodulator such as CD137/4-1BB, CD27, GIYR, and/or OC40.

[0928] An IL-2Rβγc binding compound or a pharmaceutical composition thereof may be administered in conjunction with an agent known or believed to be cytotoxic, to cause DNA damage, to cause cell cycle arrest, or to cause mitotic catastrophe.

[0929] An IL-2Rβγc binding compound or a pharmaceutical composition thereof may be administered in conjunction with an agent known or believed to modulate glutathione concentration, to modulate glutathione concentration within cells, to decrease glutathione concentration within cells, to reduce glutathione uptake into cells, to reduce glutathione synthesis, or to reduce glutathione synthesis within cells.

[0930] An IL-2Rβγc binding compound or a pharmaceutical composition thereof may be administered in conjunction with an agent known or believed to interfere with neovascularization, to reduce neovascularization, or to promote neovascularization.

[0931] An IL-2Rβγc binding compound or a pharmaceutical composition thereof may be administered in conjunction with an agent known or believed to interfere with hormone homeostasis, to interfere with hormone synthesis, to interfere with hormone receptor binding, or to interfere with hormone signal transduction.

[0932] An IL-2Rβγc binding compound or a pharmaceutical composition thereof may be administered in conjunction with an agent known or believed to interfere with growth factor homeostasis, to interfere with growth factor receptor expression, to interfere with growth factor binding to growth factor receptors, to interfere with growth factor receptor signal transduction, to interfere with the Hedgehog (Hh) signaling, to inhibit the Hedgehog pathway signaling, to inhibit ALK (anaplastic lymphoma kinase) pathway signaling, or to inhibit the non-homologous end joining (NHEJ) pathway.

[0933] An IL-2Rβγc binding compound or a pharmaceutical composition thereof may be administered in conjunction with one or more agents known or believed to be a VEGFR (vascular endothelial growth factor receptor) inhibitor, a RTK (receptor tyrosine kinase) inhibitor, a sodium channel current blocker, aFAK (focal adhesion kinase) inhibitor, a GLI (glioma-associated oncogene) inhibitor, a GLI1 inhibitor, a GLI2 inhibitor, a GLI3 inhibitor, a MAPK (mitogen-activated protein kinase) inhibitor, a MAPK/ERK pathway (also known as Ras-Raf-MEK-ERK pathways) inhibitor, a MEK1 inhibitor, a MEK2 inhibitor, a MEK5 inhibitor, a MEK5/ERK5 inhibitor, aRTA (renal tubular acidosis) inhibitor, a ALK (anaplastic lymphoma kinase) inhibitor, Aa LK kinase inhibitor, a nuclear translocation inhibitor, a PORCN (porcupine) inhibitor, a 5-ARI (5α-reductase inhibitor), topoisomerase inhibitor, a Ras (rat sarcoma) inhibitor, a K-ras inhibitor, a CERK (ceramide kinase) inhibitor, a PKB (protein kinase B, also known as AKT) inhibitor, a AKT1 inhibitor, EZH2 (enhancer of zeste homolog 2) inhibitor, a BET (bromodomain and extraterminal domain motif) inhibitor, a SYK (spleen tyrosine kinase) inhibitor, JAK (janus kinase) inhibitors, a SYK/JAK inhibitor, a IDO (indoleamine-pyrrole 2,3-dioxygenase) inhibitor, a IDO1 inhibitor, a RXR (retinoic X receptors) activating agent, a selective RXR activating agent, a p-glycoprotein inhibitor, a ERK inhibitor, a PI3K (phosphatidylinositol-4,5-bisphosphate 3-kinase) inhibitor, a BRD (bromodomain-containing protein) inhibitor, a BRD2 inhibitor, a BRD3 inhibitor, a BRD4 inhibitor, a BRDT (bromodomain testis-specific protein) inhibitor, a reverse transcriptase inhibitor, a NRT (nucleoside analog reverse-transcriptase) inhibitor, a PIM (proviral integrations of moloney virus) inhibitor, a EGFR (epidermal growth factor receptor) inhibitor, a photosensitizer, a radiosensitizer, a ROS (proto-oncogene, receptor tyrosine kinase) inhibitor, a ROS1 (proto-oncogene 1) inhibitor, a CK (casein kinase) inhibitor, a CK2 inhibitor, a Bcr-Abl (breakpoint cluster region—Abelson proto-oncogene) tyrosine-kinase inhibitor such as dasatinib, a microtubule stabilizing agent, a microtubule depolymerization/disassembly inhibitor, a DNA intercalator, an androgen receptor antagonist, a chemoprotective agents, a HDAC (histone deacetylase) inhibitor, a DPP (dipeptidyl peptidase) inhibitor, a DPP-4 inhibitor, BTK (Bruton's tyrosine kinase) inhibitor, a kinase inhibitor such as imatinib, a tyrosine kinase inhibitor such as nilotinib, a ARP (poly (ADP-ribose) polymerase) inhibitor, a CDK (cyclin-dependent kinase) inhibitor, a CDK4 inhibitor, a CDK6 inhibitor, a CDK4/6 inhibitor, a HIF1a (hypoxia-inducible factor 1-α) inhibitor, a DNA ligase inhibitor, a DNA ligase IV inhibitor, a NHEJ (non-homologous end joining) inhibitor, a DNA ligase IV, a NHEJ inhibitor and a RAF inhibitor, a TKI and a RAF inhibitor, a TKI and RAF inhibitor such as sorafenib, a PDT (photodynamic therapy) sensitizer, an ATR (ataxia telangiectasia- and Rad3-related protein kinase) inhibitor, or a combination of any of the foregoing.

[0934] An IL-2Rβγc binding compound or a pharmaceutical composition thereof may be administered in conjunction with one or more chemotherapeutic agents, such as, for example, a VEGFR inhibitor such as fruquintinib, motesanib/AMG-706, vatalanib; a RTK inhibitor such as ponatinib; a sodium channel blocker such as GS967; a FAK inhibitor such as TAE226; a GLIl and GLI2 inhibitor such as GANT61, a MEK inhibitor such as binimetinib; a RTA inhibitor such as linifanib; an ALK inhibitor such as brigstinib; bromopyruvic acid; a DNA alkylating agent such as thiotepa; nuclear translocations factors such as JSH-23; a PORCn inhibitor such as Wnt-C59; a 5α-reductase inhibitor such as dutasteride; a topoisomerase inhibitor such as carubicin; a RAS inhibitor such as Kobe0065; a CerK inhibitor such as NVP-231; an AKT inhibitor such as uprosertib; a EZH2 inhibitor such as GSK-503; a BET bromodomain inhibitor such as OTX015; a MEK5/ERK5 inhibitor such as BIX02189; a Syl/JAK inhibitor such as cerdulatinib; an IDO1 inhibitor such as NLG919; a retinoic X receptor activating agent such as bexsrotene; a PGP inhibitor such as acotiamide or actotiamide HCl; an Erk inhibitor such SCH772984; a PI3K inhibitor such as gedatolisib; a JAK inhibitor such as ruxolitinib; an AKT inhibitor such as afuresertib or afuresertib HCl; an ALK1 inhibitor such as ceritinib; an HDAC inhibitor such as abexinostat; a DPP inhibitor such as oamarigliptin; an EGFR inhibitor such as gefittinib; an EZH2 inhibitor such as GSK126; a BTK inhibitor such as ibrutinib; a kinase inhibitor such as imatinin HCl; an IDO inhibitor such as INCB024360; a DNA crosslinker such as mitomycin C; a tyrosine kinase inhibitor such as nilotinib, a PARP inhibitor such as olaparib; a tubulin stabilization promoter such as paclitaxel; a CDK4/6 inhibitor such as palbociclib; a RTK inhibitor such as sunitinib; a PDT sensitizer such as tslsporfin; a p-glycoprotein inhibitor such as tariquidar; an ATR inhibitor such as VE-822; an HDAC inhibitor such as PCI-24781; a DPP inhibitor such as omarigliptin; an EGFR inhibitor such as gefinib; an EZH2 inhibitor such as GSK126; a BTK inhibitor such as irbrutinib; an IDO inhibitor such as INCB024360; or a combination of any of the foregoing.

[0935] For example, an IL-2Rβγc binding compound or a pharmaceutical composition thereof may be administered in conjunction with another chemotherapeutic agent, such as, for example, N-acetyl cysteine (NAC), adriamycin, alemtuzumab, amifostine, arsenic trioxide, ascorbic acid, bendamustine, bevacizumab, bortezomib, busulfan, buthionine sulfoxime, carfilzomib, carmustine, clofarabine, cyclophosphamide, cyclosporine, cytarabine, dasatinib, datinomycin, defibrotide, dexamethasone, docetaxel, doxorubicin, etoposide, filgrastim, floxuridine, fludarabine, gemcitabine, interferon alpha, ipilimumab, lenalidomide, leucovorin, melphalan, mycofenolate mofetil, paclitaxel, palifermin, panobinostat, pegfilrastim, prednisolone, prednisone, revlimid, rituximab, sirolimus, sodium 2-mercaptoethane sulfonate (MESNA), sodium thiosulfate, tacrolimus, temozolomide, thalidomide, thioguanine, thiotepa, topotecan, velcade, or a combination of any of the foregoing.

[0936] An IL-2Rβγc binding compound or a pharmaceutical compositions thereof can be used in combination therapy with other chemotherapeutic agents including one or more antimetabolites such as folic acid analogs; pyrimidine analogs such as fluorouracil, floxuridine, and cytosine arabinoside; purine analogs such as mercaptopurine, thiogunaine, and pentostatin; natural products such as vinblastine, vincristine, etoposide, tertiposide, dactinomycin, daunorubicin, doxurubicin, bleomycin, mithamycin, mitomycin C, L-asparaginase, and interferon alpha; platinum coordination complexes such as cis-platinum, and carboplatin; mitoxantrone; hydroxyurea; procarbazine; hormones and antagonists such as prednisone, hydroxyprogesterone caproate, medroxyprogesterone acetate, megestrol acetate, diethylstilbestrol, ethinyl estradiol, tamoxifen, testosterone propionate, fluoxymesterone, flutamide, and leuprolide, anti-angiogenesis agents or inhibitors such as angiostatin, retinoic acids, paclitaxel, estradiol derivatives, and thiazolopyrimidine derivatives; apoptosis prevention agents; triptolide; colchicine; luliconazole; and radiation therapy.

[0937] An IL-2Rβγc binding compound or a pharmaceutical composition thereof may be co-administered with a compound that inhibits DNA repair such as, for example, O6-benzylguanine (O6-BG).

[0938] An IL-2Rβγc binding compound or a pharmaceutical composition thereof may be administered in conjunction with one or more chemotherapeutic agents, such as, for example, abarelix, abiraterone, abiraterone acetate, n-acetyl cysteine, aclarubicin hydrochloride, adriamycin, adenine, afatinib, afatinib dimaleate, alemtuzumab, alendronate sodium, alitretinoin, allopurinol sodium, altretamine, amifostine, aminoglutethimide, aminolevulinic acid, amrubicin, amsacrine, anastrozole, angiostatin, apremilast, aprepitant, arsenic trioxide, ascorbic acid, 1-asparaginase, azacitidine, azathioprine sodium, bazedoxifene (serm), belinostat, bendamustine hcl, O6-benzylguanine, bevacizumab, bexarotene, bicalutamide, biricodar, bleomycin sulfate, bortezomib, bosutinib, brivudine, buserelin, busulfan, buthionine sulfoxime, cabazitaxel, cabozantinib, capecitabine, carboplatin, carboquone, carfilzomib, carmofur, carmustine, ceritinib, chlorambucil, cisplatin, cladribine, clodronate disodium, clofarabine, crizotinib, cyclophosphamide, cyclosporine, cytarabine, cytosine arabinoside, dabrafenib, dacarbazine, dactinomycin, dasatinib, datinomycin, daunorubicin, decitabine, defribrotide, degarelix acetate, dexamethasone, dexrazoxane hydrochloride, diaziquone, diethyl stilbestrol, docetaxel, doxifluridine, doxorubicin hydrochloride, doxorubicin free base, dromostanolone propionate, dutasteride, eltrombopag, enzalutamide, epirubicin hydrochloride, eribulin mesylate, erlotinib hydrochloride, estramustine phosphate sodium, ethinyl estradiol, etoposide phosphate, etoposide, everolimus, exemestane, fentanyl, filgrastim, fingolimod, floxuridine, fludarabine phosphate, fluorouracil, fluoxymesterone, flutamide, formestane, formylmelphalan, fosaprepitant, fotemustine, fulvestrant, gefitinib, gemcitabine hydrochloride, gemcitabine free base, glutathione, glyciphosphoramide, glyfosfin, goserelin acetate, granisetron hydrochloride, heptaplatin, hexyl 5-aminolevulinate, histrelin acetate, hydroxyprogesterone caproate, hydroxyurea, ibandronate sodium, ibrutinib, icotinib, idarubicin HCl, idelalisib, idoxuridine, ifosfamide, interferon alpha, imatinib mesylate, imiquimod, ingenol mebutate, ipilimumab, irinotecan hydrochloride, ixabepilone, lanreotide acetate, lapatinib free base, lapatinib ditosylate, lasofoxifene, lenalidomide, letrozole, leucovorin calcium, leuprolide acetate, levamisole hydrochloride, levoleucovorin calcium, iobenguane, lobaplatin, lomustine, maropitant, masoprocol, mechlorethamine hydrochloride, megestrol acetate, medroxyprogesterone acetate, melphalan hydrochloride, mercaptopurine, mercaptoethane sulfonate sodium, methotrexate, methoxsalen, methyl aminolevulinate, methylene blue, methylisoindigotin, mifamurtide, miltefosine, miriplatin, mithamycin, mitobronitol, mitomycin C, mitotane, mitoxantrone hydrochloride, mycophenolate mofetil, nabiximols, nafarelin, nandrolone, nedaplatin, nelarabine, netupitant, nilotinib, nilutamide, nimustine, nintedanib, nocodazole, octreotide, olaparib, omacetaxine mepesuccinate, ondansetron hydrochloride, oxaliplatin, paclitaxel, palbociclib, palifermin, palonosetron hydrochloride, pamidronate disodium, panobinostat, pasireotide, pazopanib hydrochloride, pegfilrastim, pemetrexed disodium, pentostatin, peplomycin, pipobroman, pirarubicin, plerixafor, plicamycin, pomalidomide, ponatinib, porfimer sodium, porfiromycin, pralatrexate, prednimustine, prednisolone, prednisone, procarbazine hydrochloride, quinagolide hydrochloride, raloxifene, raltitrexed, radotinib, ranimustine, retinoic acids, revlimide, rituxinab, romidepsin, ruxolitinib, ruxolitinib phosphate, semustine, sirolimus, sodium thiosulfate, sorafenib free base, sorafenib tosylate, streptozocin, sufentanil, sunitinib, tacrolimus, talaporfin sodium, tamibarotene, tamoxifen citrate, tapentadol, temoporfin, temozolomide, temsirolimus, teniposide, teriflunomide, tertiposide, testolactone, testosterone propionate, thalidomide, thioguanine, thiotepa, thymalfasin, toceranib phosphate, topotecan hydrochloride, toremifene citrate, trabectedin, trametinib, tretinoin, trilostane, triptorelin, tropisetron, uramustine, valrubicin, vandetanib, vedotin, vemurafenib, verteporfin, vinblastine, vincristine sulfate, vincristine free base, vindesine, vinorelbine tartrate, vorinostat, and zoledronic acid.

[0939] An IL-2Rβγc binding compound or a pharmaceutical composition thereof may be administered in conjunction with one or more chemotherapeutic agents such as, for example, abemaciclib, abiraterone acetate, ABVD, ABVE, ABVE-PC, AC, acalabrutinib, AC-T, ADE, ado-trastuzumab emtansine, afatinib dimaleate, aldesleukin, alectinib, alemtuzumab, alpelisib, amifostine, aminolevulinic acid hydrochloride, anastrozole, apalutamide, aprepitant, arsenic trioxide, asparaginase Erwinia chrysanthemi, atezolizumab, avelumab, axicabtagene ciloleucel, axitinib, azacitidine, BEACOPP, belinostat, bendamustine hydrochloride, BEP, bevacizumab, bexarotene, bicalutamide, binimetinib, bleomycin sulfate, blinatumomab, bortezomib, bosutinib, brentuximab vedotin, brigatinib, BuMel, busulfan, cabazitaxel, cabozantinib-s-malate, CAF, calaspargase pegol-mknl, capecitabine, caplacizumab-yhdp, CAPOX, carboplatin, carboplatin-taxol, carfilzomib, carmustine, carmustine implant, CEM, cemiplimab-rwlc, ceritinib, cetuximab, CEV, chlorambucil, chlorambucil-prednisone, CHOP, cisplatin, cladribine, clofarabine, CMF, cobimetinib, copanlisib hydrochloride, COPDAC, COPP, COPP-ABV, crizotinib, CVP, cyclophosphamide, cytarabine, cytarabine liposome, dabrafenib mesylate, dacarbazine, dacomitinib, dactinomycin, daratumumab, darbepoetin a, dasatinib, daunorubicin hydrochloride, daunorubicin hydrochloride and cytarabine liposome, decitabine, defibrotide sodium, degarelix, denileukin diftitox, denosumab, dexamethasone, dexrazoxane hydrochloride, dinutuximab, docetaxel, doxorubicin hydrochloride, doxorubicin hydrochloride liposome, durvalumab, duvelisib, elotuzumab, eltrombopag olamine, emapalumab-lzsg, enasidenib mesylate, encorafenib, enzalutamide, epirubicin hydrochloride, EPOCH, epoetin alfa, erdafitinib, eribulin mesylate, erlotinib hydrochloride, etoposide, etoposide phosphate, everolimus, exemestane, fee, filgrastim, fludarabine phosphate, fluorouracil injection, fluorouracil—topical, flutamide, folfiri, folfiri-bevacizumab, folfiri-cetuximab, folfirinox, folfox, fostamatinib disodium, FU-LV, fulvestrant, gefitinib, gemcitabine hydrochloride, gemcitabine-cisplatin, gemcitabine-oxaliplatin, gemtuzumab ozogamicin, gilteritinib fumarate, glasdegib maleate, glucarpidase, goserelin acetate, granisetron, HPV bivalent vaccine, HPV bivalent vaccine, recombinant HPV nonavalent vaccine, HPV nonavalent vaccine, recombinant, HPV quadrivalent vaccine, HPV uadrivalent vaccine recombinant, hydroxyurea, hyper-CVAD, ibritumomab tiuxetan, ibrutinib, ICE, idarubicin hydrochloride, idelalisib, ifosfamide, imatinib mesylate, imiquimod, inotuzumab ozogamicin, interferon α-2b recombinant, iobenguane ¹³¹I, ipilimumab, irinotecan hydrochloride, irinotecan hydrochloride liposome, ivosidenib, ixabepilone, ixazomib citrate, JEB, lanreotide acetate, lapatinib ditosylate, larotrectinib sulfate, lenalidomide, lenvatinib mesylate, letrozole, leucovorin calcium, leuprolide acetate, lomustine, lorlatinib, lutetium Lu 177-dotatate, mechlorethamine hydrochloride, megestrol acetate, melphalan, melphalan hydrochloride, mercaptopurine, mesna, methotrexate, methylnaltrexone bromide, midostaurin, mitomycin c, mitoxantrone hydrochloride, mogamulizumab-kpkc, moxetumomab pasudotox-tdfk, MVAC, necitumumab, nelarabine, neratinib maleate, netupitant and palonosetron hydrochloride, nilotinib, nilutamide, niraparib tosylate monohydrate, nivolumab, obinutuzumab, OEPA, ofatumumab, OFF, olaparib, olaratumab, omacetaxine mepesuccinate, ondansetron hydrochloride, OPPA, osimertinib mesylate, oxaliplatin, paclitaxel, paclitaxel albumin-stabilized nanoparticle formulation, PAD, palbociclib, palifermin, palonosetron hydrochloride, palonosetron hydrochloride and netupitant, pamidronate disodium, panitumumab, panobinostat, pazopanib hydrochloride, PCV, PEB, pegaspargase, pegfilgrastim, peginterferon α-2b, pembrolizumab, pemetrexed disodium, pertuzumab, plerixafor, polatuzumab vedotin-piiq, pomalidomide, ponatinib hydrochloride, pralatrexate, prednisone, procarbazine hydrochloride, propranolol hydrochloride, radium 223 dichloride, raloxifene hydrochloride, ramucirumab, rasburicase, ravulizumab-cwvz, R-CHOP, R-CVP, recombinant HPV bivalent vaccine, recombinant HPV nonavalent vaccine, recombinant HPV quadrivalent vaccine, recombinant interferon α-2b, regorafenib, R-EPOCH, ribociclib, R-ICE, rituximab, rituximab and hyaluronidase human, rolapitant hydrochloride, romidepsin, romiplostim, rucaparib camsylate, ruxolitinib phosphate, siltuximab, sipuleucel-t, sonidegib, sorafenib tosylate, STANFORD V, sunitinib malate, TAC, tagraxofusp-erzs, talazoparib tosylate, talc, talimogene laherparepvec, tamoxifen citrate, temozolomide, temsirolimus, thalidomide, thioguanine, thiotepa, tisagenlecleucel, tocilizumab, topotecan hydrochloride, toremifene, TPF, trabectedin, trametinib, trastuzumab, trastuzumab and hyaluronidase-oysk, trifluridine and tipiracil hydrochloride, uridine triacetate, VAC, Valrubicin, VAMP, vandetanib, VeIP, vemurafenib, venetoclax, vinblastine sulfate, vincristine sulfate liposome, vinorelbine tartrate, vip, vismodegib, vorinostat, XELIRI, XELOX, Ziv-aflibercept, zoledronic acid, and combinations of any of the foregoing.

[0940] The efficacy of administering an IL-2Rβγc binding compound or a pharmaceutical composition thereof for treating cancer may be assessed using in vitro and animal studies and in clinical trials.

[0941] The suitability of an IL-2Rβγc binding compound or a pharmaceutical composition thereof in treating cancer may be determined by methods described in the art. For example, screens developed to demonstrate the anti-tumor activity of oncolytic agents are known (Miller, et al., J Med Chem, 1977, 20(3), 409-413; Sweeney, et al., Cancer Res, 1978, 38(9), 2886-2891; and Weiss and Von Hoff, Semin Oncol, 1985, 12(3 Suppl 4), 69-74).

[0942] An IL-2Rβγc binding compound or a pharmaceutical composition thereof can be useful in treating inflammatory diseases.

[0943] An IL-2Rβγc binding compound or a pharmaceutical composition thereof may be administered to treat an inflammatory disease.

[0944] Examples of inflammatory diseases include allergy, Alzheimer's disease, anemia, ankylosing spondylitis, arthritis, atherosclerosis, asthma, autism, arthritis, carpal tunnel syndrome, celiac disease, colitis, Crohn's disease, congestive heart failure, dermatitis, diabetes, diverticulitis, eczema, fibromyalgia, fibrosis, gall bladder disease, gastroesophageal reflux disease, Hashimoto's thyroiditis, heart attack, hepatitis, irritable bowel syndrome, kidney failure, lupus, multiple sclerosis, nephritis, neuropathy, pancreatitis, Parkinson's disease, psoriasis, polymyalgia rheumatica, rheumatoid arthritis, scleroderma, stroke, surgical complications, and ulcerative colitis.

[0945] An IL-2Rβγc binding compound or a pharmaceutical composition thereof can be useful in treating autoimmune diseases. Autoimmune diseases can be defined as human diseases in which the immune system attacks its own proteins, cells, and/or tissues. A comprehensive listing and review of autoimmune diseases can be found, for example, in The Autoimmune Diseases, Rose and Mackay, 2014, Academic Press.

[0946] An IL-2Rβγc binding compound or a pharmaceutical composition thereof may be administered to treat an autoimmune disease.

[0947] Examples of autoimmune diseases include Addison's disease, agammaglobulinemia, alopecia areata, amyloidosis, ankylosing spondylitis, anti-GBM/anti-TBN nephritis, antiphospholipid syndrome, autoimmune angioedema, autoimmune dysautonomia, autoimmune encephalomyelitis, autoimmune hepatitis, autoimmune inner ear disease, autoimmune myocarditis, autoimmune pancreatitis, autoimmune retinopathy, autoimmune urticaria, axonal and neuronal neuropathy, Balo disease, Behcet's disease, benign mucosal pemphigoid, bullous pemphigoid, Castleman disease, celiac disease, Chagas disease, chronic inflammatory demyelinating polyneuropathy, chronic recurrent multifocal osteomyelitis, Churg-Strauss, cicatricial pemphigoid, Cogan' syndrome, cold agglutinin disease, congenital heart block, Coxcackie myocarditits, CREST syndrome, Crohn's disease, dermatitis herpetiformis, dermatomyositis, Devic's disease, discoid lupus, Dressler's syndrome, endometriosis, eosinophilic esophagitis, eosinophilic fasciitis, erythema nodosum, essential mixed cryoglobulinemia, Evans syndrome, fibromyalgia, fibrosing alveolitis, giant cell arteritis, giant cell myocarditis, glomerulonephritis, Goodpasture's syndrome, granulomatosis with polyangiitis, Graves' disease, Gullain-Barre syndrome, Hashimoto's thyroiditis, hemolytic anemia, Henoch-Schonlein purpura, herpes gestationis or pemphigoid gestationis, hypogammaglobulinemia, IgA nephropathy, IgG4-related sclerosing disease, immune thrombocytopenic purpura, inclusion body myositis, interstitial cystitis, juvenile arthritis, juvenile diabetes, juvenile myositis, Kawasaki disease, Lambert-Eaton syndrome, leukocytoclastic vasculitis, lichen planus, lichen sclerosus, ligneous conjunctivitis, linear IgA disease, lupus, Lyme disease chronic, Meniere's diseases, microscopic polyangiitis, mixed connective tissue disease, Mooren's ulcer, Mucha-Habermann disease, multiple sclerosis, myasthenia gravis, myositis, narcolepsy, neuromyelitis, optica, neutropenia, ocular cicatricial pemphigoid, optic neuritis, palindromic rheumatism, PANDAS, paraneoplastic cerebellar degeneration, paroxysmal nocturnal hemoglobinuria, Parry Romberg syndrome, pars planitis, Parsonnage-Turner syndrome, pemphigus, peripheral neuropathy, perivenous encephalomyelitis, pernicious anemia, POEMS syndrome, polyarteritis nodosa, polyglandular syndromes, polymyalgia rheumatica, polymyositis, postmyocardial infarction syndrome, postpericardiotomy syndrome, primary biliary cirrhosis, primary sclerosing cholangitis, progesterone dermatitis, psoriasis, psoriatic arthritis, pure red cell aplasia, pyoderma gangrenosum, Raynaud's phenomenon, reactive arthritis, reflex sympathetic dystrophy, relapsing polychondritis, restless legs syndrome, retroperitoneal fibrosis, rheumatic fever, rheumatoid arthritis, sarcodosis, Schmidt syndrome, scleritis, scleroderma, Sjogren's syndrome, sperm and testicular autoimmunity, stiff person syndrome, subacute bacterial endocarditis, Susac's syndrome, sympathetic ophthalmia, Takayasu's arteritis, temporal arteritis, thrombocytopenic purpura, Tolosa-Hunt syndrome, transverse myelitis, type 1 diabetes, ulcerative colitis, undifferentiated connective tissue disease, uveitis, vaculitis, vitiligo, and Wegener's granulomatosis.

[0948] An IL-2Rβγc binding compound or a pharmaceutical composition thereof can be use to treat autoimmune disorders such as, for example, lupus, graft-versus-host disease, hepatitis C-induced vasculitis, Type I diabetes, multiple sclerosis, spontaneous loss of pregnancy, atopic diseases, and inflammatory bowel diseases.

[0949] An IL-2Rβγc binding compound can be administered with one or more additional therapeutic agents for treating an autoimmune disease. An IL-2Rβγc binding compound or a pharmaceutical composition thereof may be administered in conjunction with one or more immunosuppressants including, for example, corticosteroids such as prednisone, budesonide, and prednisolone; Janus kinase inhibitors such as tofacitinib; calcineurin inhibitors such as cyclosporine and tacrolimus; mTOR inhibitors such as sirolimus and everolimus; IMDH inhibitors such as azathioprine, leflunomide, and mycophenolate; biologics such as abatacept adalimumab, anakinra, certolizumab, etanercept, golimumab, infliximab, ixekizumab, natalizumab, rituximab, secukinumab, tocilizumab, ustekinumab, and vedolizumab; and monoclonal antibodies such as basiliximab and daclizumab.

[0950] An IL-2Rβγc binding compound or a pharmaceutical composition thereof may be administered to a patient to treat a disease associated with the activation, proliferation, metabolism, and/or differentiation of T-cells.

[0951] An IL-2Rβγc binding compound or a pharmaceutical composition thereof may be administered to a patient to treat an organ transplant.

[0952] An IL-2Rβγc binding compound or a pharmaceutical composition thereof may be administered in conjunction with an agent known or believed to interfere with proliferation, to interfere with mitosis, to interfere with DNA replication, or to interfere with DNA repair.

[0953] An IL-2Rβγc binding compound or a pharmaceutical composition thereof may be administered to a patient to treat an immune deficiency disease.

[0954] Examples of primary immune deficiency disease include autoimmune lymphoproliferative syndrome, autoimmune polyglandular syndrome type 1, BENTA disease, caspase eight deficiency state, CARD9 deficiency, chronic granulomatous disease, common variable immunodeficiency, congenital neutropenia syndromes, CTLA4 deficiency, DOCK8 deficiency, GATA2 deficiency, glycosylation disorders, hyper-immunoglobulin E syndromes, hyper-immunoglobulin M syndromes, interferon γ, interleukin 12 and interleukin 23 deficiency, leukocyte adhesion deficiency, LRBA deficiency, PI2 kinase disease, PLCG2-associated antibody deficiency and immune dysregulation, severe combined immunodeficiency, STAT3 dominant-negative disease, STAT3 gain-of-function disease, warts, hypogammaglobulinemia, infections, and myelokathexis syndrome, Wiskott-Aldrich syndrome, X-linked agammaglobulinemia, X-linked lymphoproliferative disease, and XMEN disease.

[0955] Secondary immune deficiency disease occurs when the immune system is compromised to an environmental factor such as infection, chemotherapy, severe burns, or malnutrition. Examples of secondary immune deficiency diseases include newborn immunodeficiencies such as immature lymphoid organs, absent memory immunity, low maternal IgG levels, decreased neutrophil storage pool, decreased neutrophil function, and decreased natural killer cell activity; advanced age related immunodeficiencies such as decreased antigen-specific cellular immunity, T-cell oligoconality, and restricted B-cell repertoire; malnutrition related immunodeficiencies such as decreased cellular immune response and weekend mucosal barriers; diabetes mellitus related immunodeficiencies such as decreased mitogen-induced lymphoproliferation, defective phagocytosis, and decreased chemotaxis; chronic uremia related immunodeficiencies such as decreased cellular immune response, decreased generation of memory antibody responses, and decreased chemotaxis; genetic syndromes such as defective phagocytosis, defective chemotaxis, and variable defects of antigen-specific immune responses; and anti-inflammatory, immunomodulatory, and immuno-suppressive drug therapy related immune deficiencies such as lymphopenia, decreased cellular immune response and anergy, decreased proinflammatory cytokines, decreased phagocytosis, decreased chemotaxis, neutropenia, and weakened mucosal barriers; environmental conditions such as increased lymphocyte apoptosis, increased secretion of tolerogenic cytokines, cytopenia, decreased cellular immunity and anergy, and stress-induced nonspecific immune activation; and infectious diseases such as T-cell lymphopenia, decreased cellular immune response and anergy, and defective antigen-specific antibody responses.

[0956] An IL-2Rβγc binding compound or a pharmaceutical composition thereof may be administered to a patient to increase the immune response in immuno-compromised patients.

[0957] An IL-2Rβγc binding compound or a pharmaceutical composition thereof may be administered to a patient to increase the immune response in the patient.

[0958] An IL-2Rβγc binding compound or a pharmaceutical composition thereof may be administered to a patient to treat an infectious disease.

[0959] Examples of infectious diseases include Acinetobacter infections, actinomycosis, African sleeping sickness (African trypanosomiasis), AIDS (acquired immunodeficiency syndrome), amoebiasis, anaplasmosis, angiostrongyliasis, anisakiasis, anthrax, Arcanobacterium haemolyticum infection, Argentine hemorrhagic fever, ascariasis, aspergillosis, astrovirus infection, babesiosis, Bacillus cereus infection, bacterial meningitis, bacterial pneumonia, bacterial vaginosis, Bacteroides infection, balantidiasis, bartonellosis, Baylisascaris infection, Bejel, syphilis, yaws, BK virus infection, black piedra, blastocystosis, blastomycosis, Bolivian hemorrhagic fever, botulism (and Infant botulism), Brazilian hemorrhagic fever, brucellosis, bubonic plague, Burkholderia infection, buruli ulcer, calicivirus infection (Norovirus and Sapovirus), campylobacteriosis, candidiasis (Moniliasis; Thrush), capillariasis, carrion's disease, cat-scratch disease, cellulitis, Chagas disease (American trypanosomiasis), chancroid, chickenpox, chikungunya, chlamydia, Chlamydophila pneumoniae infection (Taiwan acute respiratory agent or TWAR), cholera, chromoblastomycosis, Chytridiomycosis, clonorchiasis, Clostridium difficile colitis, coccidioidomycosis, Colorado tick fever (CTF), common cold (acute viral rhinopharyngitis; Acute coryza, Coronavirus disease 2019 (COVID-19), Creutzfeldt-Jakob disease (CJD), Crimean-Congo hemorrhagic fever (CCHF), cryptococcosis, cryptosporidiosis, cutaneous larva migrans (CLM), cyclosporiasis, cysticercosis, cytomegalovirus infection, Dengue fever, desmodesmus infection, dientamoebiasis, diphtheria, diphyllobothriasis, dracunculiasis, Ebola hemorrhagic fever, echinococcosis, Ehrlichiosis, enterobiasis (pinworm infection), Enterococcus infection, enterovirus infection, epidemic typhus, Epstein-Barr virus infectious mononucleosis (Mono), erythema infectiosum (Fifth disease), fxanthem subitum (Sixth disease), fasciolosis, fasciolopsiasis, fatal familial insomnia (FFI), filariasis, food poisoning by Clostridium perfringens, free-living amebic infection, Fusobacterium infection, gas gangrene (Clostridial myonecrosis), geotrichosis, Gerstmann-Straussler-Scheinker syndrome (GSS), giardiasis, glanders, gnathostomiasis, gonorrhea, granuloma inguinale (Donovanosis), Group A streptococcal infection, Group B streptococcal infection, Haemophilus influenzae infection, hand, foot and mouth disease (HFMD), Hantavirus Pulmonary Syndrome (HPS), Heartland virus disease, Helicobacter pylori infection, hemolytic-uremic syndrome (HUS), hemorrhagic fever with renal syndrome (HFRS), Hendra virus infection, Hepatitis A, Hepatitis B, Hepatitis C, Hepatitis D, Hepatitis E, Herpes simplex, histoplasmosis, hookworm infection, human bocavirus infection, human ewingii ehrlichiosis, human granulocytic anaplasmosis (HGA), human metapneumovirus infection, human monocytic ehrlichiosis, human papillomavirus (HPV) infection, human parainfluenza virus infection, hymenolepiasis, influenza (flu), isosporiasis, Kawasaki disease, keratitis, Kingella kingae infection, Kuru, Lassa fever, Legionellosis (Legionnaires' disease), leishmaniasis, leprosy, leptospirosis, listeriosis, Lyme disease (Lyme borreliosis), lymphatic filariasis (elephantiasis), lymphocytic choriomeningitis, malaria, Marburg hemorrhagic fever (MHF), measles, melioidosis (Whitmore's disease), meningitis, meningococcal disease, metagonimiasis, microsporidiosis, Middle East respiratory syndrome (MERS), molluscum contagiosum (MC), monkeypox, mumps, murine typhus (Endemic typhus), mycetoma, Mycoplasma genitalium infection, mycoplasma pneumonia, myiasis, neonatal conjunctivitis (Ophthalmia neonatorum), Nipah virus infection, nocardiosis, Norovirus (children and babies), onchocerciasis (River blindness), opisthorchiasis, paracoccidioidomycosis (South American blastomycosis), paragonimiasis, pasteurellosis, pediculosis capitis (Head lice), pediculosis corporis (Body lice), pediculosis pubis (pubic lice, crab lice), pelvic inflammatory disease (PID), pertussis (whooping cough), plague, pneumococcal infection, pneumocystis pneumonia (PCP), pneumonia, poliomyelitis, Pontiac fever, Prevotella infection, primary amoebic meningoencephalitis (PAM), progressive multifocal leukoencephalopathy, psittacosis, Q fever, rabies, relapsing fever, respiratory syncytial virus infection, rhinosporidiosis, rhinovirus infection, rickettsial infection, rickettsialpox, Rift Valley fever (RVF), Rocky Mountain spotted fever (RMSF), rotavirus infection, rubella, salmonellosis, SARS (severe acute respiratory syndrome), scabies, scarlet fever, schistosomiasis, sepsis, shigellosis (bacillary dysentery), shingles (Herpes zoster), smallpox (variola), sporotrichosis, staphylococcal food poisoning, staphylococcal infection, strongyloidiasis, subacute sclerosing panencephalitis, taeniasis, tetanus (lockjaw), tinea barbae (barber's itch), tinea capitis (ringworm of the scalp), tinea corporis (ringworm of the body), tinea cruris (Jock itch), tinea manum (ringworm of the hand), tinea nigra, tinea pedis (athlete's foot), tinea unguium (onychomycosis), tinea versicolor (Pityriasis versicolor), toxocariasis (ocular larva migrans (OLM)), toxocariasis (visceral larva migrans (VLM)), toxoplasmosis, trachoma, trichinosis, trichomoniasis, trichuriasis (whipworm infection), tuberculosis, tularemia, typhoid fever, typhus fever, Ureaplasma urealyticum infection, valley fever, Venezuelan equine encephalitis, Venezuelan hemorrhagic fever, Vibrio parahaemolyticus enteritis, Vibrio vulnificus infection, viral pneumonia, West Nile fever, white piedra (tinea blanca), yellow fever, Yersinia pseudotuberculosis infection, yersiniosis, zeaspora, Zika fever, and zygomycosis.

[0960] An IL-2Rβγc binding compound provided by the present disclosure can be used, either alone or in combination, to treat diseases including acute myeloid leukemia, B-cell lymphoma, chronic myelogenous leukemia, depression, gingival recession, hepatitis C, HIV infections, human papillomavirus, idiopathic CD4 lymphopenia, immunodeficiency secondary to organ transplantation, lipodystrophy, Kaposi sarcoma lymphoma, lymphopenia, mantle cell lymphoma, multiple sclerosis, myelodysplastic syndrome, non-Hodgkin lymphoma, recurrent adult diffuse large cell lymphoma, recurrent follicular lymphoma, rheumatoid arthritis, sepsis, and Type 2 diabetes.

[0961] An IL-2Rβγc binding compound provided by the present disclosure can be used to treat cancers such as metastatic breast cancer, breast cancer, colon cancer, bladder cancer, metastatic prostate cancer, stage IV prostate cancer, castration-resistant prostate carcinoma, neuroblastoma, melanoma, kidney cancer, myeloproliferative neoplasm, sarcoma, and neurodermal tumors.

[0962] An IL-2Rβγc binding compound provided by the present disclosure can be used in combination with temozolomide to great glioblastoma, with atezolizumab to treat skin cancers such as MCC, C5CC and melanoma, with pembrolizumab to treat triple negative breast cancer, and in combination with CAR-T therapy to treat pediatric acute lymphoblastic leukemia.

[0963] An IL-2Rβγc binding compound or a pharmaceutical composition thereof may be administered to a patient together with another compound for treating an inflammatory disease or an autoimmune disease in the patient. The at least one other therapeutic agent may be a different IL-2Rβγc binding compound provided by the present disclosure. An IL-2Rβγc binding compound and the at least one other therapeutic agent may act additively or synergistically. The at least one additional therapeutic agent may be included in the same pharmaceutical composition or vehicle comprising the IL-2Rβγc binding compound or may be in a separate pharmaceutical composition or vehicle. Accordingly, methods provided by the present disclosure further include, in addition to administering an IL-2Rβγc binding compound, administering one or more therapeutic agents effective for treating an inflammatory disease or an autoimmune disease or a different disease, disorder or condition than an inflammatory disease or an autoimmune disease. Methods provided by the present disclosure include administering IL-2Rβγc binding compound and one or more other therapeutic agents provided that the combined administration does not inhibit the therapeutic efficacy of the IL-2Rβγc binding compound and/or does not produce adverse combination effects.

[0964] IL-2Rβγc binding compounds provided by the present disclosure can be useful in vitro as tools for understanding the biological role of IL-2, including the evaluation of the many factors thought to influence, and be influenced by, the production of IL-2 and the receptor binding process. The present compounds are also useful in the development of other compounds that bind to and activate the IL-2R, because the present compounds provide useful information concerning the relationship between structure and activity that should facilitate such development.

[0965] The IL-2Rβγc binding compounds are also useful as competitive binders in assays to screen for new IL-2 receptor agonists and antagonists. In such assays, IL-2Rβγc binding compounds can be used without modification or can be modified in a variety of ways; for example, by labeling, such as covalently or non-covalently joining a moiety which directly or indirectly provides a detectable signal. In any of these assays, the materials thereto can be labeled either directly or indirectly. Possibilities for direct labeling include label groups such as: radiolabels such as ¹²⁵I, enzymes such as peroxidase and alkaline phosphatase, and fluorescent labels capable of monitoring the change in fluorescence intensity, wavelength shift, or fluorescence polarization. Possibilities for indirect labeling include biotinylation of one constituent followed by binding to avidin coupled to one of the above label groups. The compounds may also include spacers or linkers in cases where the compounds are to be attached to a solid support.

[0966] Based on their ability to bind to the IL-2R, IL-2Rβγc binding compounds provided by the present disclosure can be used as reagents for detecting IL-2R, for example, on living cells, fixed cells, in biological fluids, in tissue homogenates, in purified, and natural biological materials. For example, by labeling such peptides, one can identify cells expressing the IL-2Rβ and IL-2Rγc subunits. In addition, based on their ability to bind to IL-2R, the IL-2Rβγc binding compounds of the present disclosure can be used, for example, in in situ staining, FACS (fluorescence-activated cell sorting), Western Blotting, and ELISA. In addition, based on their ability to bind to IL-2R, IL-2Rβγc binding compounds provided by the present disclosure can be used in receptor purification, or in purifying cells expressing IL-2R on the cell surface (or inside permeabilized cells).

[0967] IL-2Rβγc binding compounds provided by the present disclosure can also be utilized as commercial reagents for various medical research and diagnostic uses. Such uses include, for example, (1) use as a calibration standard for quantitating the activities of candidate IL-2 agonists in a variety of functional assays; (2) use to maintain the proliferation and growth of IL-2-dependent cell lines; (3) use in structural analysis of IL-2R through co-crystallization; (4) use to investigate the mechanism of IL-2 signal transduction/receptor activation; and (5) other research and diagnostic applications where IL-2R is activated or such activation is conveniently calibrated against a known quantity of an IL-2R agonist.

[0968] Aspects of the present invention include nucleic acids encoding for the IL-2Rβ ligands, the IL-2Rγc ligands, the IL-2Rβγc ligands, the tandem IL-2Rβγc ligands, the IL-2Rβγc ligand constructs, and the IL-2Rβγc binding compounds provided by the present disclosure.

[0969] The nucleic acids/isolated polynucleotides encoding the IL-2Rβ ligands, IL-2Rγc ligands, and the IL-2Rβγc binding compounds provided by the present disclosure can be incorporated into expression vectors depending in part on the host cells used to produce the IL-2Rβ ligands, the IL-2Rγc ligands, and the IL-2Rβγc binding compounds. Generally, the nucleic acids can be operably linked to any number of regulatory elements such as, for example, promoters, origin of replication, selectable markers, ribosomal binding sites, and/or inducers. The expression vectors can be extra-chromosomal or integrating vectors.

[0970] The nucleic acids and/or expression can be transformed into any number of different types of host cells including mammalian, bacterial, yeast, insect and/or fungal cells, with mammalian cells such as CHO cells.

[0971] A nucleic acid encoding an IL-2Rβγc ligand can comprise a first nucleic acid sequence encoding an IL-2Rβ ligand; a second nucleic acid sequence encoding a peptidyl ligand linker; and a third nucleic acid sequence encoding an IL-2Rγc ligand.

[0972] A nucleic acid encoding an IL-2Rβγc ligand fusion protein can comprise a first nucleic acid sequence encoding the IL-2Rβγc ligand provided by the present disclosure; and a second nucleic acid sequence encoding a fusion partner. A nucleic acid encoding an IL-2Rβγc ligand fusion protein can comprise a nucleic acid encoding an IL-2Rβγc ligand and the fusion partner. A nucleic acid encoding an IL-2Rβγc ligand fusion protein can further comprise a nucleic acid segment encoding a construct linker and a nucleic acid encoding an IL-2Rβγc ligand fusion protein can comprise a nucleic acid encoding an IL-2Rβγc ligand, the fusion partner, and the construct linker.

[0973] The fusion partner can comprise, for example, HSA, an Fc-fragment, an IgG, an antibody directed to a cell-specific antigen, and an antibody directed to a cell-specific receptor.

[0974] A nucleic acid encoding an IL-2Rβγc fusion protein can further comprise a nucleic acid encoding a peptidyl linker, where the peptidyl linker is configured to bind the IL-2Rβγc ligand to the fusion partner.

[0975] A nucleic acid provided by the present disclosure can encode a fusion protein comprising an IL-2Rβγc ligand, and a linker binding the C-terminus of the IL-2Rβγc ligand to HSA.

[0976] A nucleic acid provided by the present disclosure can encode a fusion protein comprising a dimeric Fc-Fragment of IgG1, IgG2, or IgG4, an IL-2Rβγc ligand, and a linker binding the N-terminus of an IL-2Rβγc ligand to the C-terminus of one CH3 domain of the dimeric Fc-fragment.

[0977] A nucleic acid provided by the present disclosure can encode a fusion protein comprising a dimeric Fc-Fragment of IgG1, IgG2, or IgG4, two IL-2Rβγc ligands, and a linker binding the N-terminus of each of the two IL-2Rβγc ligands to the C-terminus of each CH3 domain of the dimeric Fc-fragment.

[0978] A nucleic acid provided by the present disclosure can encode a fusion protein comprising a heavy chain of an immunoglobulin molecule such as IgG1, IgG2, or IgG4, an IL-2Rβγc ligand, and a Fc linker bonding the N-terminus of the IL-2Rβγc ligand to the C-terminus of the Fc region.

[0979] A nucleic acid provided by the present disclosure can comprise a nucleic acid encoding for an IL-2Rβγc binding compound provided by the present disclosure and an RNA and/or DNA vaccine.

[0980] A nucleic acid provided by the present disclosure can comprise a nucleic acid encoding for an IL-2Rβγc binding vaccine construct. The vaccine can comprise, for example, a cancer vaccine or a viral vaccine.

[0981] A nucleic acid provided by the present disclosure can comprise a nucleic acid encoding for an IL-2Rβγc binding construct comprising a viral surface antigen.

[0982] A nucleic acid provided by the present disclosure can comprise a nucleic acid encoding for an IL-2Rβγc binding construct comprising a virus-like particle.

[0983] A nucleic acid provided by the present disclosure can encode for an IL-2Rβ ligand provided by the present disclosure, or can encode for an amino acid sequence comprising an amino acid sequence having greater than 60%, greater than 70%, greater than 80%, greater than 85%, greater than 90%, or greater than 95% sequence similarity to an IL-2Rβ ligand provided by the present disclosure.

[0984] A nucleic acid provided by the present disclosure can encode for an IL-2Rβ ligand comprising an amino acid sequence of any one of SEQ ID NOS: 612, 664, 671, 865, 856, 858, 864, 869, 870, 874, 875, and 901, or can encode for an amino acid sequence comprising an amino acid sequence having greater than 60%, greater than 70%, greater than 80%, greater than 85%, greater than 90%, or greater than 95% sequence similarity to any one of SEQ ID NOS: 612, 664, 671, 865, 856, 864, 858, 869, 870, 874, 875, and 901.

[0985] A nucleic acid provided by the present disclosure can encode for an IL-2Rγc ligand provided by the present disclosure, or can encode for an amino acid sequence comprising an amino acid sequence having greater than 60%, greater than 70%, greater than 80%, greater than 85%, greater than 90%, or greater than 95% sequence similarity to an IL-2Rγc ligand provided by the present disclosure.

[0986] A nucleic acid provided by the present disclosure can encode for an IL-2Rγc ligand comprising an amino acid sequence of any one of SEQ ID NOS: 965, 980, 981, 985, 1024, 1026, and 1028, or can encode for an amino acid sequence comprising an amino acid sequence having greater than 60%, greater than 70%, greater than 80%, greater than 85%, greater than 90%, or greater than 95% sequence similarity to any one of SEQ ID NOS: 965, 980, 981, 985, 1024, 1026, and 1028.

[0987] nucleic acid provided by the present disclosure can encode for an IL-2Rβγc ligand provided by the present disclosure, or can encode for an amino acid sequence comprising an amino acid sequence having greater than 60%, greater than 70%, greater than 80%, greater than 85%, greater than 90%, or greater than 95% sequence similarity to an IL-2Rβγc ligand provided by the present disclosure.

[0988] A nucleic acid provided by the present disclosure can encode for an IL-2Rβγc ligand comprising an amino acid sequence of any one of SEQ ID NOS: 1263-1270, or can encode for an amino acid sequence comprising an amino acid sequence having greater than 60%, greater than 70%, greater than 80%, greater than 85%, greater than 90%, or greater than 95% sequence similarity to any one of SEQ ID NOS: 1263-1270.

[0989] A nucleic acid provided by the present disclosure can encode for an IL-2Rβγc ligand fusion protein provided by the present disclosure, or can encode for an amino acid sequence comprising an amino acid sequence having greater than 60%, greater than 70%, greater than 80%, greater than 85%, greater than 90%, or greater than 95% sequence similarity to an IL-2Rβγc ligand fusion protein provided by the present disclosure.

[0990] A nucleic acid provided by the present disclosure can encode for an IL-2Rβγc ligand fusion protein comprising an amino acid sequence of any one of SEQ ID NOS: 1212-1252, or can encode for an amino acid sequence comprising an amino acid sequence having greater than 60%, greater than 70%, greater than 80%, greater than 85%, greater than 90%, or greater than 95% sequence similarity to any one of SEQ ID NOS: 1212-1252.

[0991] A nucleic acid provided by the present disclosure can encode for an IL-2Rβγc ligand construct comprising an IL-2Rβ ligand comprising an amino acid sequence of SEQ ID NO: 865 or an amino acid sequence comprising an amino acid sequence having greater than 60%, greater than 70%, greater than 80%, greater than 85%, greater than 90%, or greater than 95% sequence similarity to SEQ ID NO: 865; and an IL-2Rγc ligand comprising an amino acid sequence of SEQ ID NO: 965 or an amino acid sequence comprising an amino acid sequence having greater than 60%, greater than 70%, greater than 80%, greater than 85%, greater than 90%, or greater than 95% sequence similarity to SEQ ID NO: 965.

[0992] A nucleic acid provided by the present disclosure can encode for a tandem IL-2Rβγc ligand comprising two or more IL-2Rβγc ligands provided by the present disclosure.

[0993] Aspects of the invention include expression vectors comprising a nucleic acid encoding an IL-2Rβ ligand, an IL-2Rγc ligand, an IL-2Rβγc ligand, a tandem IL-2Rβγc ligand, or an IL-2Rβγc ligand construct provided by the present disclosure.

[0994] Aspects of the invention further include a host cell comprising an expression vector comprising a nucleic acid encoding an IL-2Rβ ligand, an IL-2Rγc ligand, an IL-2Rβγc ligand, a tandem IL-2Rβγc ligand, or an IL-2Rβγc ligand construct provided by the present disclosure.

[0995] Methods provided by the present disclosure include methods of making an IL-2Rβ ligand, an IL-2Rγc ligand, an IL-2Rβγc ligand, a tandem IL-2Rβγc ligand, or an IL-2Rβγc ligand construct provided by the present disclosure, comprising culturing a host cell, wherein the host cell comprises an expression vector comprising a nucleic acid encoding an IL-2Rβ ligand, an IL-2Rγc ligand, an IL-2Rβγc ligand, a tandem IL-2Rβγc ligand, or an IL-2Rβγc ligand construct provided by the present disclosure, under conditions where the IL-2Rβ ligand, IL-2Rγc ligand, IL-2Rβγc ligand, tandem IL-2Rβγc ligand, or IL-2Rβγc ligand construct is expressed, and recovering the expressed IL-2Rβ ligand, IL-2Rγc ligand, IL-2Rβγc ligand, tandem IL-2Rβγc ligand, or IL-2Rβγc ligand construct.

### ASPECTS OF THE INVENTION

[0996] The invention is further defined by the following aspects.

[0997] Aspect 1. An IL-2Rβγc ligand comprising:
[0998] (a) an IL-2Rβ ligand, wherein the IL-2Rβ ligand comprises an amino acid sequence of Formula (1) (SEQ ID NO: 805), Formula (1a) (SEQ ID NO: 806), Formula (1b) (SEQ ID NO: 807), Formula (1c) (SEQ ID NO: 808), or Formula (1d) (SEQ ID NO: 809), or an amino acid sequence having a greater than 60% sequence similarity to an amino acid sequence of Formula (1) (SEQ ID NO: 805), Formula (1a) (SEQ ID NO: 806), Formula (1b) (SEQ ID NO: 807), Formula (1c) (SEQ ID NO: 808), or Formula (1d) (SEQ ID NO: 809):

-X²¹¹-X²¹²-X²¹³-X²¹⁴-C-X²¹⁵-X²¹⁶-X²¹⁷-X²¹⁸-X²¹⁹-X²²⁰-X²²¹-X²²²-C-X²²³-X²⁴-X²²⁵- (1)

-X²¹²-X²¹³-X²¹⁴-C-X²¹⁵-X²¹⁶-X²¹⁷-X²¹⁸-X²¹⁹-X²²⁰-X²²¹-X²²²-C-X²²³-X²²⁴- (1a)

-X²¹³-X²¹⁴-C-X²¹⁵-X²¹⁶-X²¹⁷-X²¹⁸-X²¹⁹-X²²⁰-X²²¹-X²²²-C-X²²³-X²²⁴- (1b)

-X²¹⁴-C-X²¹⁵-X²¹⁶-X²¹⁷-X²¹⁸-X²¹⁹-X²²⁰-X²²¹-X²²²-C-X²²³- (1c)

-C-X²⁵-X²¹⁶-X²⁷-X²¹⁸-X²¹⁹-X²²⁰-X²²¹-X²²²-C- (1d)
[0999] wherein,
   [1000] X²¹¹ is selected from an amino acid;
   [1001] X²¹² is selected from F, H, W, and Y;
   [1002] X²¹³ is selected from F, H, I, L, M, V, W, and Y;
   [1003] X²¹⁴ is P;
   [1004] X²¹⁵ is selected from F, H, W, and Y;
   [1005] X²¹⁶ is selected from F, I, L, M, V, W, and Y;
   [1006] X²¹⁷ is A;
   [1007] X²¹⁸ is selected from K, R, H, N, Q, S, T, and Y;
   [1008] X²¹⁹ is selected from F, I, L, M, V, W, and Y;
   [1009] X²²⁰ is G;
   [1010] X²²¹ is selected from D, E, H, N, Q, S, T, and Y;
   [1011] X²²² is L;
   [1012] X²²³ is D;
   [1013] X²²⁴ is selected from F, I, L, M, V, W, and Y; and
   [1014] X²²⁵ is selected from D and E;
[1015] (b) an IL-2Rγc ligand, wherein the IL-2Rγc ligand comprises an amino acid sequence of Formula (5) (SEQ ID NO: 944), Formula (5a) (SEQ ID NO: 945), Formula (5b) (SEQ ID NO: 946), Formula (5c) (SEQ ID NO: 947), Formula (5d) (SEQ ID NO: 948), or Formula (5e) (SEQ ID NO: 949), or an amino acid sequence having a greater than 60% sequence similarity to an amino acid sequence of Formula (5) (SEQ ID NO: 944), Formula (5a) (SEQ ID NO: 945), Formula (5b) (SEQ ID NO: 946), Formula (5c) (SEQ ID NO: 947), Formula (5d) (SEQ ID NO: 948), or Formula (5e) (SEQ ID NO: 949):

-X¹⁷¹-X¹⁷²-X¹⁷³-X¹⁷⁴-X¹⁷⁵-C-X¹⁷⁶-X¹⁷⁷-X¹⁷⁸-X¹⁷⁹-X¹⁸⁰-X¹⁸¹-X¹⁸²-X¹⁸³-C-X¹⁸⁴-X¹⁸⁵-X¹⁸⁶-X¹⁸⁷-X₁₈₈- (5)

-X¹⁷²-X¹⁷³-X¹⁷⁴-X¹⁷⁵-C-X¹⁷⁶-X¹⁷⁷-X¹⁷⁸-X¹⁷⁹-X¹⁸⁰-X¹⁸¹-X¹⁸²-X¹⁸³-C-X¹⁸⁴-X¹⁸⁸-X¹⁸⁶-X¹⁸⁷- (5a)

-X¹⁷³-X¹⁷⁴-X¹⁷⁵-C-X¹⁷⁶-X¹⁷⁷-X¹⁷⁸⁷-X¹⁷⁹-X¹⁸⁰-X¹⁸¹-X¹⁸²-X¹⁸³-C-X¹⁸⁴-X¹⁸⁵-X¹⁸⁶- (5b)

-X¹⁷⁴-X¹⁷⁵-C-X¹⁷⁶-X¹⁷⁷-X¹⁷⁸-X¹⁷⁹-X¹⁸⁰⁰-X¹⁸¹-X¹⁸²-X¹⁸³-C-X¹⁴-X¹⁸⁵- (5c)

-X¹⁷⁵-C-X¹⁷⁶-X¹⁷⁷-X¹⁷⁸-X¹⁷⁹-X¹⁸⁰-X¹⁸¹-X¹⁸²-X¹⁸³-C-X¹⁸⁴- (5d)

-C-X¹⁷⁶-X¹⁷⁷-X¹⁷⁸-X¹⁷⁹-X¹⁸⁰-X¹⁸¹-X¹⁸²-X¹⁸³-C- (5e)
[1016] wherein,
[1017] X¹⁷¹ is selected from H, K, and R;
[1018] X¹⁷² is selected from S, T, and Y;
[1019] X¹⁷³ is selected from D, E, F, I, L, M, V, W, and Y;
[1020] X¹⁷⁴ is selected from F, I, L, M, V, W, and Y;
[1021] X¹⁷⁵ is selected from D, E, F, I, L, M, V, W, and Y;
[1022] X¹⁷⁶ is selected from D, E, H, N, Q, S, T, and Y;
[1023] X⁷⁷ is selected from D and E;
[1024] X¹⁷⁸ is selected from F, H, I, L, M, V, W, and Y;
[1025] X¹⁷⁹ is selected from D, E, H, N, Q, S, T, and Y;
[1026] X¹⁸⁰ is G;
[1027] X¹⁸¹ is V;
[1028] X¹⁸² is E;
[1029] X¹⁸³ is L;
[1030] X¹¹⁴ is selected from W;
[1031] X¹⁸⁵ is selected from F, I, L, M, V, W, Y, H, N, Q, S, and T;
[1032] X¹⁸⁶ is E;
[1033] X¹⁸⁷ is selected from an amino acid; and
[1034] X¹⁸⁸ is selected from D and E; and
[1035] (c) an IL-2Rβγc ligand linker binding the IL-2Rβ ligand to the IL-2Rγc ligand.

[1036] Aspect 2. The IL-2Rβγc ligand of aspect 1, wherein in an IL-2Rβ ligand of Formula (5)-(5e):
[1037] X²¹¹ is selected from H, K, and R;
[1038] X²¹² is W;
[1039] X²¹³ is Y;
[1040] X²¹⁴ is P;
[1041] X²¹⁵ is W;
[1042] X²¹⁶ is M;
[1043] X²¹⁷ is A;
[1044] X²¹⁷ is selected N and Q;
[1045] X²¹⁹ is selected from L and V;
[1046] X²²⁰ is G;
[1047] X²²¹ is selected from E, D, and Q;
[1048] X²²² is L;
[1049] X²²³ is D;
[1050] X²²⁴ is selected from L and M; and
[1051] X²²⁵ is selected from D and E.

[1052] Aspect 3. The IL-2Rβγc ligand of aspect 1, wherein in an IL-2Rβ ligand of Formula (5)-(5e):
[1053] X²¹¹ is selected from A, D, E, G, H, L, M, N, Q, R, S, T, and V;
[1054] X²¹² is selected from C, F, W, and Y;
[1055] X²¹³ is selected from F, H, K, L, N, Q, R, S, W, and Y;
[1056] X²¹⁴ is P;
[1057] X²¹⁵ is selected from W and Y;
[1058] X²¹⁶ is selected from F, I, K, L, M, R, S, T, and V;
[1059] X²¹⁷ is A;
[1060] X²¹⁸ is selected from D, E, G, H, K, L, N, Q, R, S, and Y;
[1061] X²¹⁹ is selected from L, P, and V;
[1062] X²²⁰ is selected from G, H, and W;
[1063] X²²¹ is selected from D, E, and Q;
[1064] X²²² is selected from L and M;
[1065] X²²³ is D;
[1066] X²²⁴ is selected from L, M, Q, and V; and
[1067] X²²⁵ is selected from A, D, E, F, G, H, L, N, Q, T, and V.

[1068] Aspect 4. The IL-2Rβγc ligand of aspect 1, wherein in an IL-2Rβ ligand of Formula (5)-(5e):
[1069] X²¹¹ is selected from H an R;
[1070] X²¹² is selected from F and W;
[1071] X²¹³ is selected from F, L, W, and Y;
[1072] X²¹⁴ is P;
[1073] X²¹⁵ is selected from W and Y;
[1074] X²¹⁶ is selected from F, I, L, M, and V;
[1075] X²¹⁷ is A;
[1076] X²¹⁸ is selected D, E, H, K, N, Q, and R;
[1077] X²¹⁹ is selected from L and V;
[1078] X²²⁰ is G;
[1079] X²²¹ is selected from D, E, and Q;
[1080] X²²² is selected from L and M;
[1081] X²²³ is D;
[1082] X²²⁴ is selected L, M, and V; and
[1083] X²²⁵ is selected from D and E.

[1084] Aspect 5. The IL-2Rβγc ligand of aspect 1, wherein in an IL-2Rβ ligand of Formula (5)-(5e):
[1085] X²¹¹ is selected from H and R;
[1086] X²¹² is W;
[1087] X²¹³ is Y;
[1088] X²¹⁴ is P;
[1089] X²¹⁵ is W;
[1090] X²¹⁶ is M;
[1091] X²¹⁷ is A;
[1092] X²¹⁸ is selected from K and R;
[1093] X²¹⁹ is L;
[1094] X²²⁰ is G;
[1095] X²²¹ is selected from E and Q;
[1096] X²²² is L;
[1097] X²²³ is D;
[1098] X²²⁴ is L; and
[1099] X²²⁵ is selected from D and E.

[1100] Aspect 6. The IL-2Rβγc ligand of any one of aspects 1 to 5, wherein in an IL-2Rγc ligand of Formula (5)-(5e):
[1101] X¹⁷¹ is selected from H, K, and R;
[1102] X¹⁷² is selected from S, T, and Y;
[1103] X¹⁷³ is selected from D and E;
[1104] X¹⁷⁴ is V;
[1105] X¹⁷⁵ is selected from D and E;
[1106] X¹⁷⁶ is selected from E and Q;
[1107] X¹⁷⁷ is selected from D and E;
[1108] X¹⁷⁸ is selected from F, H, W, and Y;
[1109] X¹⁷⁹ is selected from D, E, and Q;
[1110] X¹⁸⁰ is G;
[1111] X¹⁸¹ is V;
[1112] X¹⁸² is E;
[1113] X¹⁸³ is L;
[1114] X¹⁸⁴ is W;
[1115] X¹⁸⁵ is selected from F, I, L, M, V, W, Y, H, N, Q, S, and T;
[1116] X¹⁸⁶ is E;
[1117] X¹⁸⁷ is selected from an amino acid; and
[1118] X¹⁸⁸ is selected from D and E.

[1119] Aspect 7. The IL-2Rβγc ligand of any one of aspects 1 to 5, wherein in an IL-2Rγc ligand of Formula (5)-(5e):
[1120] X¹⁷¹ is selected from H, K, and R;
[1121] X¹⁷² is selected from S, T, and Y;
[1122] X¹⁷³ is selected from F, I, L, M, V, W, and Y;
[1123] X¹⁷⁴ is V;
[1124] X¹⁷⁵ is selected from F, I, L, M, V, W, and Y;
[1125] X¹⁷⁶ is selected from E and Q;
[1126] X¹⁷⁷ is selected from D and E;
[1127] X¹¹⁷ is selected from F, H, W, and Y;
[1128] X¹⁷⁹ is selected from D, E, and Q;
[1129] X¹⁸⁰ is G;
[1130] X¹⁸¹ is V;
[1131] X¹⁸² is E;
[1132] X¹⁸³ is L;
[1133] X¹⁸⁴ is W;
[1134] X¹¹⁵ is selected from F, I, L, M, V, W, Y, H, N, Q, S, and T;
[1135] X¹⁸⁶ is E;
[1136] X¹⁸⁷ is selected from an amino acid; and
[1137] X¹⁸⁸ is selected from D and E.

[1138] Aspect 8. The IL-2Rβγc ligand of any one of aspects 1 to 5, wherein in an IL-2Rγc ligand of Formula (5)-(5e):
[1139] X¹¹⁷ is selected from H, K, and R;
[1140] X¹⁷² is selected from S, T, and Y;
[1141] X¹⁷³ is selected from D, E, F, I, L, M, V, W, and Y;
[1142] X¹⁷⁴ is V;
[1143] X¹⁷⁵ is selected from D, E, F, I, L, M, V, W, and Y;
[1144] X¹⁷⁶ is selected from D, E, H, N, Q, S, T, and Y;
[1145] X¹⁷⁶ is selected from E and Q;
[1146] X¹⁷⁷ is selected from D and E;
[1147] X¹⁷⁸ is W;
[1148] X¹⁷⁹ is selected from D, E, and Q;
[1149] X¹⁸⁰ is G;
[1150] X¹⁸¹ is V;
[1151] X¹⁸² is E;
[1152] X¹⁸³ is L;
[1153] X¹⁸⁴ is W;
[1154] X¹⁸⁵ is selected from F, I, L, M, V, W, Y, H, N, Q, S, and T;
[1155] X¹⁸⁶ is E;
[1156] X¹⁸⁷ is selected from an amino acid; and
[1157] X¹⁸⁸ is selected from D and E.

[1158] Aspect 9. The IL-2Rβγc ligand of aspect 1, wherein, (a) the IL-2Rβ ligand comprises an amino acid sequence of Formula (1), Formula (1a), Formula (1b), Formula (1c), or Formula (1d); and (b) the IL-2Rγc ligand comprises an amino acid sequence of Formula (5), Formula (5a), Formula (5b), Formula (5c), Formula (5d), or Formula (5e).

[1159] Aspect 10. The IL-2Rβγc ligand of aspect 1, wherein, (a) the IL-2Rβ ligand comprises an amino acid sequence having a greater than 60% sequence similarity to an amino acid sequence of Formula (1), Formula (1a), Formula (1b), Formula (1c), or Formula (1d); and (b) the IL-2Rγc ligand comprises an amino acid sequence having a greater than 60% sequence similarity to an amino acid sequence of Formula (12), Formula (5a), Formula (5b), Formula (5c), Formula (5d), or Formula (5e).

[1160] Aspect 11. The IL-2Rβγc ligand of aspect 1, wherein, the IL-2Rβ ligand comprises an amino acid sequence selected from any one of SEQ ID NOS: 805-903; and the IL-2Rγc ligand comprises an amino acid sequence selected from any one of SEQ ID NOS: 944-1028.

[1161] Aspect 12. The IL-2Rβγc ligand of aspect 1, wherein, the IL-2Rβ ligand comprises an amino acid sequence selected from any one of SEQ ID NOS: 612, 664, 865, 856, 858, 864, 869, 870, 874, 875, and 901; and the IL-2Rγc ligand comprises an amino acid sequence selected from any one of SEQ ID NOS: 965, 980, 981, 985, 1024, 1026, and 1028.

[1162] Aspect 13. The IL-2Rβγc ligand of aspect 1, wherein the IL-2Rβ ligand has greater than 60% amino acid sequence similarity to any one of SEQ ID NO: 805-903.

[1163] Aspect 14. The IL-2Rβγc ligand of aspect 1, wherein the IL-2Rγc ligand has greater than 60% amino acid sequence similarity to any one of SEQ ID NO: 944-1028.

[1164] Aspect 15. The IL-2Rβγc ligand of aspect 1, wherein, the IL-2Rβ ligand has greater than 60% amino acid sequence similarity to any one of SEQ ID NOS: 612, 664, 865, 856, 858, 864, 869, 870,874, 875, and 901; and the IL-2Rγc ligand has greater than 60% amino acid sequence similarity to any one of SEQ ID NOS: 965, 980, 981, 985, 1024, 1026, and 1028.

[1165] Aspect 16. The IL-2Rβγc ligand of any one of aspects 1 to 15, wherein the IL-2Rβ ligand comprises a disulfide bond between the two cysteines of the IL-2Rβ ligand.

[1166] Aspect 17. The IL-2Rβγc ligand of any one of aspects 1 to 15, wherein the IL-2Rγc ligand comprises a disulfide bond between the two cysteines of the IL-2Rβγc ligand.

[1167] Aspect 18. The IL-2Rβγc ligand of any one of aspects 1 to 15, wherein the IL-2Rβγc ligand comprises a disulfide bond between a cysteine of the IL-2Rβ ligand and a cysteine of the IL-2Rγc ligand.

[1168] Aspect 19. The IL-2Rβγc ligand of any one of aspects 1 to 15, wherein each of the cysteines of the IL-2Rβ ligand are bound to a cysteine of the IL-2Rγc ligand by a disulfide bond.

[1169] Aspect 20. The IL-2Rβγc ligand of any one of aspects 1 to 19, wherein the IL-2Rβ ligand is a pH-biased IL-2Rβ ligand and/or the IL-2Rγc ligand is a pH-biased IL-2Rγc ligand.

[1170] Aspect 21. The IL-2Rβγc ligand of any one of aspects 1 to 20, wherein the IL-2Rβγc ligand is a pH-biased IL-2Rβγc ligand.

[1171] Aspect 22. The IL-2Rβγc ligand of any one of aspects 1 to 21, wherein the IL-2Rβ ligand binds to a specific binding site of the IL-2Rβ subunit, wherein IL-2, an IL-2Rβ ligand comprising an amino acid sequence of SEQ ID NO: 1044, and an IL-2Rγc ligand comprising SEQ ID NO: 224 do not compete with the IL-2Rβ ligand for binding to the specific binding site on the IL-2Rβ subunit.

[1172] Aspect 23. The IL-2Rβγc ligand of any one of aspects 1 to 22, wherein, the IL-2Rβ ligand binds to the IL-2Rβ subunit with an IC₅₀ of less than 100 μM; and the IL-2Rβ ligand binds to the IL-2Rγc subunit with an IC₅₀ of greater than 100 μM.

[1173] Aspect 24. The IL-2Rβγc ligand of any one of aspects 1 to 23, wherein the IL-2Rγc ligand binds to a specific binding site of the IL-2Rγc subunit, wherein IL-2, an IL-2Rγc ligand comprising an amino acid sequence of SEQ ID NO: 1032, and an IL-2Rβ ligand comprising SEQ ID NO: 58 do not compete with the IL-2Rγc ligand for binding to the specific binding site on the IL-2Rγc subunit.

[1174] Aspect 25. The IL-2Rβγc ligand of any one of aspects 1 to 24, wherein, the IL-2Rγc ligand binds to the IL-2Rγc subunit with an IC₅₀ of less than 100 μM; and the IL-2Rγc ligand binds to the IL-2Rβ subunit with an IC₅₀ of greater than 100 μM.

[1175] Aspect 26. The IL-2Rβγc ligand of any one of aspects 1 to 25, wherein each of the C-terminus and/or the N-terminus of the IL-2Rβ ligand independently comprises from 2 to 10 flanking amino acids.

[1176] Aspect 27. The IL-2Rβγc ligand of any one of aspects 1 to 26, wherein each of the C-terminus and/or the N-terminus of the IL-2Rβ ligand independently comprises flanking amino acids selected from -G- (SEQ ID NO: 9390), -GG- (SEQ ID NO: 9400), or -GGRR- (SEQ ID NO: 9402).

[1177] Aspect 28. The IL-2Rβγc ligand of any one of aspects 1 to 27, wherein each of the C-terminus and/or the N-terminus of the IL-2Rγc ligand independently comprises from 2 to 10 flanking amino acids.

[1178] Aspect 29. The IL-2Rβγc ligand of any one of aspects 1 to 28, wherein each of the C-terminus and/or the N-terminus of the IL-2Rγc ligand independently comprises flanking amino acids selected from -G- (SEQ ID NO: 9390), -GG- (SEQ ID NO: 9400), or -GGRR- (SEQ ID NO: 9402).

[1179] Aspect 30. The IL-2Rβγc ligand of any one of aspects 1 to 29, wherein the C-terminus of the IL-2Rβ ligand and the C-terminus of the IL-2Rγc ligand are bound to the IL-2Rβγc ligand linker.

[1180] Aspect 31. The IL-2Rβγc ligand of any one of aspects 1 to 29, wherein the C-terminus of the IL-2Rβ ligand and the N-terminus of the IL-2Rγc ligand are bound to the IL-2Rβγc ligand linker.

[1181] Aspect 32. The IL-2Rβγc ligand of any one of aspects 1 to 29, wherein the N-terminus of the IL-2Rβ ligand and the C-terminus of the IL-2Rγc ligand are bound to the IL-2Rβγc ligand linker.

[1182] Aspect 33. The IL-2Rβγc ligand of any one of aspects 1 to 29, wherein the N-terminus of the IL-2Rβ ligand and the N-terminus of the IL-2Rγc ligand are bound to the IL-2Rβγc ligand linker.

[1183] Aspect 34. The IL-2Rβγc ligand of any one of aspects 1 to 33, wherein the IL-2Rβγc ligand linker has a length from 5 Å to 200 Å.

[1184] Aspect 35. The IL-2Rβγc ligand of any one of aspects 1 to 34, wherein the IL-2Rβγc ligand linker is configured to facilitate binding of the IL-2Rβγc ligand to IL-2R.

[1185] Aspect 36. The IL-2Rβγc ligand of any one of aspects 1 to 35, wherein the IL-2Rβγc ligand linker is configured to activate IL-2R.

[1186] Aspect 37. The IL-2Rβγc ligand of any one of aspects 1 to 36, wherein the IL-2Rβγc ligand linker comprises a synthetic IL-2Rβγc ligand linker.

[1187] Aspect 38. The IL-2Rβγc ligand of any one of aspects 1 to 36, wherein the synthetic IL-2Rβγc ligand linker comprises a triazole.

[1188] Aspect 39. The IL-2Rβγc ligand of any one of aspects 1 to 36, wherein the IL-2Rβγc ligand linker comprises a peptidyl IL-2Rβγc ligand linker.

[1189] Aspect 40. The IL-2Rβγc ligand of aspect 37, wherein the peptidyl IL-2Rβγc ligand linker comprises from 2 to 20 amino acids.

[1190] Aspect 41. The IL-2Rβγc ligand of aspect 37, wherein the peptidyl IL-2Rβγc ligand linker comprises (G)ₙ (SEQ ID NO: 9380), (GS)ₙ (SEQ ID NO: 9381), (GGS)ₙ (SEQ ID NO: 9382), (GGGS)ₙ (SEQ ID NO: 9383), or (GGGGS)ₙ (SEQ ID NO: 9384), wherein n is an integer from 1 to 20.

[1191] Aspect 42. The IL-2Rβγc ligand of any one of aspects 1 to 41, wherein the IL-2Rβγc linker comprises a cleavable IL-2Rβγc ligand linker.

[1192] Aspect 43. The IL-2Rβγc ligand of aspect 1, wherein the IL-2Rβγc ligand comprises: an IL-2Rβ ligand comprising the amino acid sequence of SEQ ID NO: 865; and an IL-2Rγc ligand comprising an amino acid sequence of SEQ ID NO: 965.

[1193] Aspect 44. The IL-2Rβγc ligand of aspect 1, wherein the IL-2Rβγc ligand comprises: an IL-2Rβ ligand comprising an amino acid sequence having greater than 60% sequence similarity to SEQ ID NO: 865; and an IL-2Rγc ligand comprising an amino acid sequence having greater than 60% sequence similarity to SEQ ID NO: 965.

[1194] Aspect 45. The IL-2Rβγc ligand of aspect 44, wherein the IL-2Rβγc ligand linker comprises (G)ₙ(SEQ ID NO: 9380), (GS)ₙ(SEQ ID NO: 9381), (GGS)ₙ (SEQ ID NO: 9382). (GGGS)ₙ (SEQ ID NO: 9383), or (GGGGS)ₙ (SEQ ID NO: 9384), wherein n is an integer from 1 to 20.

[1195] Aspect 46. The IL-2Rβγc ligand of aspect 44, wherein the IL-2Rβγc ligand linker comprises -GGS- (SEQ ID NO: 9392).

[1196] Aspect 47. The IL-2Rβγc ligand of aspect 1, wherein the IL-2Rβγc ligand comprises the amino acid sequence of SEQ ID NO: 1263 or an amino acid sequence having greater that 60% sequence similarity to SEQ ID NO: 1263.

[1197] Aspect 48. The IL-2Rβγc ligand of aspect 47, wherein the IL-2Rβγc ligand comprises one or more flanking glycines.

[1198] Aspect 49. The IL-2Rβγc ligand of aspect 1, wherein the IL-2Rβγc ligand comprises the amino acid sequence of SEQ ID NO: 1264 or an amino acid sequence having greater that 60% sequence similarity to SEQ ID NO: 1264.

[1199] Aspect 50. The IL-2Rβγc ligand of aspect 49, wherein, the cysteines of the IL-2Rβ ligand are bound to each other by a disulfide bond; and the cysteines of the IL-2Rγc ligand are bound to each other by a disulfide bond.

[1200] Aspect 51. The IL-2Rβγc ligand of aspect 49, wherein the cysteines of the IL-2Rβ ligand are bound to the cysteines of the IL-2Rγc ligand.

[1201] Aspect 52. The IL-2Rβγc ligand of any one of aspects 1 to 51, wherein the IL-2Rβγc ligand is a full IL-2R agonist.

[1202] Aspect 53. The IL-2Rβγc ligand of any one of aspects 1 to 51, wherein the IL-2Rβγc ligand is a partial IL-2R agonist.

[1203] Aspect 54. The IL-2Rβγc ligand of any one of aspects 1 to 53, wherein the IL-2Rβγc ligand is a pH-biased IL-2R agonist.

[1204] Aspect 55. The IL-2Rβγc ligand of any one of aspects 1 to 51, wherein the IL-2Rβγc ligand is an IL-2R agonist for the STAT5 phosphorylation, AKT phosphorylation, and ERK1/2 phosphorylation pathways in NK-92 cells and TF-1β cells.

[1205] Aspect 56. A tandem IL-2Rβγc ligand, wherein the tandem IL-2Rβγc ligand comprises two or more of the IL-2Rβγc ligands of any one of aspects 1 to 55.

[1206] Aspect 57. The tandem IL-2Rβγc ligand of aspect 56, wherein each of the two or more IL-2Rβγc ligands is the same.

[1207] Aspect 58. The tandem IL-2Rβγc ligand of any one of aspects 56 to 57, wherein at least one of the two or more IL-2Rβγc ligands is different than another IL-2Rβγc ligand.

[1208] Aspect 59. The tandem IL-2Rβγc ligand of any one of aspects 56 to 58, wherein each of the two or more IL-2Rβγc ligands is bound to another IL-2Rβγc ligand through a tandem linker.

[1209] Aspect 60. The tandem IL-2Rβγc ligand of any one of aspects 56 to 59, wherein, the C-terminus of a first IL-2Rβγc ligand is bound to the tandem linker; and the N-terminus of a second IL-2Rβγc ligand is bound to the tandem linker.

[1210] Aspect 61. The tandem IL-2Rβγc ligand of any one of aspects 56 to 60, wherein the tandem linker comprises a peptidyl tandem linker.

[1211] Aspect 62. The tandem IL-2Rβγc ligand of aspect 61, wherein the peptidyl tandem linker comprises from 2 to 20 amino acids.

[1212] Aspect 63. The tandem IL-2Rβγc ligand of any one of aspects 61 to 62, wherein the peptidyl tandem linker has a length from 5 to 200 Å.

[1213] Aspect 64. An IL-2Rβγc ligand construct, wherein the IL-2Rβγc ligand construct comprises one or more of the IL-2Rβγc ligands of any one of aspects 1 to 55 bound to a construct partner.

[1214] Aspect 65. The IL-2Rβγc ligand construct of aspect 64, wherein, the IL-2Rβγc ligand construct comprises two or more IL-2Rβγc ligands; and each of the two or more IL-2Rβγc ligands is the same.

[1215] Aspect 66. The IL-2Rβγc ligand construct of aspect 64, wherein, the IL-2Rβγc ligand construct comprises two or more IL-2Rβγc ligands; and at least one of the two or more IL-2Rβγc ligands is different than at least one of the other IL-2Rβγc ligand.

[1216] Aspect 67. The IL-2Rβγc ligand construct of any one of aspects 64 to 66, further comprising a construct linker, wherein an IL-2Rβγc ligand is bound to the construct partner through the construct linker.

[1217] Aspect 68. The IL-2Rβγc ligand construct of aspect 67, wherein the IL-2Rβγc ligand is bound to the construct linker through the C-terminus of the IL-2Rβγc ligand.

[1218] Aspect 69. The IL-2Rβγc ligand construct of aspect 67, wherein the IL-2Rβγc ligand is bound to the construct linker through the N-terminus of the IL-2Rβγc ligand.

[1219] Aspect 70. The IL-2Rβγc ligand construct of any one of aspects 67 to 69, wherein the construct linker comprises a peptidyl construct linker.

[1220] Aspect 71. The IL-2Rβγc ligand construct of aspect 70, wherein the peptidyl construct linker comprises from 2 to 200 amino acids.

[1221] Aspect 72. The IL-2Rβγc ligand construct of any one of aspects 70 to 71, wherein the peptidyl construct linker has a length from 5 Å to 200 Å.

[1222] Aspect 73. The IL-2Rβγc ligand construct of aspect 70, wherein the peptidyl construct linker comprises (G)ₙ (SEQ ID NO: 9380), (GS)ₙ (SEQ ID NO: 9381), (GGS)ₙ (SEQ ID NO: 9382), (GGGS)ₙ (SEQ ID NO: 9383), (GGGGS)ₙ (SEQ ID NO: 9384), or (PA)ₙ (SEQ ID NO: 9421), wherein n is an integer from 1 to 20.

[1223] Aspect 74. The IL-2Rβγc ligand construct of as aspect 67, wherein the construct linker comprises a cleavable construct linker.

[1224] Aspect 75. The IL-2Rβγc ligand construct of any one of aspects 64 to 74, wherein, the construct partner comprises a polypeptide; and the IL-2Rβγc ligand is bound to the C-terminus and/or the N-terminus of the polypeptide.

[1225] Aspect 76. The IL-2Rβγc ligand construct of any one of aspects 64 to 74, wherein, the construct partner comprises a polypeptide; and the IL-2Rβγc ligand is bound to an amino acid side chain.

[1226] Aspect 77. The IL-2Rβγc ligand construct of any one of aspects 64 to 74, wherein, the construct partner comprises a polypeptide; and the IL-2Rβγc ligand is incorporated into the polypeptide.

[1227] Aspect 78. The IL-2Rβγc ligand construct of any one of aspects 64 to 77, wherein the construct partner comprises a compound configured to impart a desired pharmacokinetic property to the IL-2Rβγc ligand in the systemic circulation of a patient.

[1228] Aspect 79. The IL-2Rβγc ligand construct of any one of aspects 64 to 78, wherein the construct partner comprises a compound configured to impart a desired biodistribution property to the IL-2Rβγc ligand in the body of a patient.

[1229] Aspect 80. The IL-2Rβγc ligand construct of any one of aspects 64 to 79, wherein the construct partner is selected from a polymer, a polypeptide, an Fc-fragment, an immunoglobulin fragment, and an antibody.

[1230] Aspect 81. The IL-2Rβγc ligand construct of any one of aspects 64 to 79, wherein the construct partner is selected from human serum albumin, a polypeptide, and a polyethylene glycol.

[1231] Aspect 82. The IL-2Rβγc ligand construct of any one of aspects 64 to 79, wherein the IL-2Rβγc ligand construct comprises a recombinant fusion protein.

[1232] Aspect 83. The IL-2Rβγc ligand construct of any one of aspects 64 to 82, wherein the IL-2Rβγc ligand construct comprises an amino acid sequence selected from any one of SEQ ID NOS: 1212-1252 or an amino acid sequence having greater than 60% sequence similarity to any one of SEQ ID NOS: 1212-1252.

[1233] Aspect 84. The IL-2Rβγc ligand construct of any one of aspects 64 to 82, wherein the IL-2Rβγc ligand comprises the amino acid sequence of SEQ ID NO: 1263 or an amino acid sequence having greater than 60% sequence similarity to SEQ ID NO: 1263.

[1234] Aspect 85. The IL-2Rβγc ligand construct of any one of aspects 64 to 84, wherein the construct partner comprises an Fc-fragment.

[1235] Aspect 86. The IL-2Rβγc ligand construct of aspect 85, wherein the Fc-fragment is derived from IgG1, IgG2, or IgG4, or a mutant of any of the foregoing.

[1236] Aspect 87. The IL-2Rβγc ligand construct of any one of aspects 85 to 86, wherein the IL-2Rβγc ligand is bound to a C-terminus of the Fc-fragment.

[1237] Aspect 88. The IL-2Rβγc ligand construct of aspect 87, wherein the IL-2Rβγc ligand is bound to a N-terminus of the Fc-fragment.

[1238] Aspect 89. The IL-2Rβγc ligand construct of aspect 87, wherein the IL-2Rβγc ligand is bound to the Fc-fragment though an Fc-fragment linker.

[1239] Aspect 90. The IL-2Rβγc ligand construct of aspect 89, wherein the Fc-fragment linker comprises a peptidyl Fc-fragment linker.

[1240] Aspect 91. The IL-2Rβγc ligand construct of aspect 89, wherein the peptidyl Fc-fragment linker comprises from 2 to 200 amino acids.

[1241] Aspect 92. The IL-2Rβγc ligand construct of aspect 89, wherein the peptidyl Fc-fragment linker has a length from 5 to 200 Å.

[1242] Aspect 93. The IL-2Rβγc ligand construct of aspect 89, wherein the peptidyl Fc-fragment linker comprises (G)ₙ (SEQ ID NO: 9380), (GS)ₙ (SEQ ID NO: 9381), (GGS)ₙ (SEQ ID NO: 9382), (GGGS)ₙ (SEQ ID NO: 9383), (GGGGS)ₙ (SEQ ID NO: 9384), or (PA)ₙ (SEQ ID NO: 9421), wherein n is an integer from 1 to 20.

[1243] Aspect 94. The IL-2Rβγc ligand construct of any one of aspects 64 to 84, wherein the construct partner is an immunoglobulin fragment.

[1244] Aspect 95. The IL-2Rβγc ligand construct of aspect 94, wherein the immunoglobulin fragment is selected from an IgG1 fragment, an IgG2 fragment, and an IgG4 fragment.

[1245] Aspect 96. The IL-2Rβγc ligand construct of aspect 94, wherein the IL-2Rβγc ligand is bound to a C-terminus of the immunoglobulin fragment.

[1246] Aspect 97. The IL-2Rβγc ligand construct of aspect 94, wherein the IL-2Rβγc ligand is bound to an N-terminus of the immunoglobulin fragment.

[1247] Aspect 98. The IL-2Rβγc ligand construct of aspect 94, wherein the IL-2Rβγc ligand is bound to the immunoglobulin fragment though an immunoglobulin linker.

[1248] Aspect 99. The IL-2Rβγc ligand construct of aspect 98, wherein the immunoglobulin linker comprises a peptidyl immunoglobulin linker.

[1249] Aspect 100. The IL-2Rβγc ligand construct of aspect 99, wherein the peptidyl immunoglobulin linker comprises from 2 to 200 amino acids.

[1250] Aspect 101. The IL-2Rβγc ligand construct of aspect 99, wherein the peptidyl immunoglobulin linker has a length from 5 to 200 Å.

[1251] Aspect 102. The IL-2Rβγc ligand construct of aspect 99, wherein the peptidyl immunoglobulin linker comprises ((G)ₙ (SEQ ID NO: 9380), (GS)ₙ (SEQ ID NO: 9381), (GGS)ₙ (SEQ ID NO: 9382), (GGGS)ₙ(SEQ ID NO: 9383), (GGGGS)ₙ(SEQ ID NO: 9384), or (PA)ₙ(SEQ ID NO: 9421), wherein n is an integer from 1 to 20.

[1252] Aspect 103. The IL-2Rβγc ligand construct of aspect 89, wherein at least one IL-2Rβγc ligand is bound to an immunoglobulin heavy chain.

[1253] Aspect 104. The IL-2Rβγc ligand construct of aspect 89, wherein at least one IL-2Rβγc ligand is bound to an immunoglobulin light chain.

[1254] Aspect 105. The IL-2Rβγc ligand construct of any one of aspects 64 to 84, wherein the construct partner comprises an antibody.

[1255] Aspect 106. The IL-2Rβγc ligand construct of aspect 99, wherein the antibody is directed to a tumor antigen.

[1256] Aspect 107. The IL-2Rβγc ligand construct of aspect 106, wherein the tumor antigen is selected from CEA and FAP.

[1257] Aspect 108. The IL-2Rβγc ligand construct of aspect 105, wherein the antibody is directed to a checkpoint inhibitor.

[1258] Aspect 109. The IL-2Rβγc ligand construct of aspect 108, wherein the checkpoint inhibitor is PD-1.

[1259] Aspect 110. The IL-2Rβγc ligand construct of aspect 109, wherein in the PD-1 antibody is selected from cemiplimab and pembrolizumab.

[1260] Aspect 111. The IL-2Rβγc ligand construct of aspect 105, wherein the antibody is directed to a cell-specific antigen.

[1261] Aspect 112. The IL-2Rβγc ligand construct of aspect 111, wherein the cell-specific antigen is selected from CD25, NK62D, and CD8.

[1262] Aspect 113. The IL-2Rβγc ligand construct of aspect 105, wherein the antibody further comprises a cytokine.

[1263] Aspect 114. The IL-2Rβγc ligand construct of aspect 113, wherein the cytokine comprises an interleukin.

[1264] Aspect 115. The IL-2Rβγc ligand construct of any one of aspects 64 to 84, wherein the IL-2Rβγc ligand construct comprises a cell-targeting moiety.

[1265] Aspect 116. The IL-2Rβγc ligand construct of aspect 115, wherein the cell-targeting moiety comprises a tumor targeting moiety.

[1266] Aspect 117. The IL-2Rβγc ligand construct of aspect 115, wherein the cell-targeting moiety comprises an immune cell targeting moiety.

[1267] Aspect 118. The IL-2Rβγc ligand construct of any one of aspects 64 to 84, wherein the IL-2Rβγc ligand construct further comprises a ubiquitin-like modifier.

[1268] Aspect 119. The IL-2Rβγc ligand construct of any one of aspects 64 to 118, wherein the IL-2Rβγc ligand construct further comprises a therapeutically effective moiety in addition to the IL-2Rβγc ligand.

[1269] Aspect 120. The IL-2Rβγc ligand construct of any one of aspects 64 to 119, wherein the IL-2Rβγc ligand construct is a full IL-2R agonist.

[1270] Aspect 121. The IL-2Rβγc ligand construct of any one of aspects 64 to 119, wherein the IL-2Rβγc ligand construct is a partial IL-2R agonist.

[1271] Aspect 122. The IL-2Rβγc ligand construct of any one of aspects 64 to 121, wherein the IL-2Rβγc ligand construct is a pH-biased IL-2R agonist.

[1272] Aspect 123. An IL-2Rβγc ligand construct, wherein the IL-2Rβγc ligand construct comprises a construct partner, at least one IL-2Rβ ligand bound to the construct partner, and at least one IL-2Rγc ligand bound to the construct partner, wherein,
[1273] (a) the IL-2Rβ ligand comprises an amino acid sequence of Formula (11) (SEQ ID NO: 805), Formula (11a) (SEQ ID NO: 806), Formula (11 b) (SEQ ID NO: 807), Formula (11c) (SEQ ID NO: 808), or Formula (11d) (SEQ ID NO: 809), or an amino acid sequence having a greater than 60% sequence similarity to an amino acid sequence of Formula (11) (SEQ ID NO: 805), Formula (11a) (SEQ ID NO: 806), Formula (11 b) (SEQ ID NO: 807), Formula (11c) (SEQ ID NO: 808), or Formula (11d) (SEQ ID NO: 809):

-X²¹²-X²¹³-X²¹⁴-C-X²¹⁵-X²¹⁶-X²¹⁷-X²¹⁸-X²¹⁹-X²²⁰-X²²¹-X²²²-C-X²²³-X²²⁴-X²²⁵ (11)

-X²¹²-X²¹³-X²¹⁴-C-X²¹⁵-X²¹⁶-X²¹⁷-X²¹⁸-X²¹⁹-X²²⁰-X²²¹-X²²²-C-X²²³-X²²⁴- (11a)

-X²¹³-X²¹⁴-C-X²¹⁵-X²¹⁶-X²¹⁷-X²¹⁸-X²¹⁹-X²²⁰-X²²¹-X²²²-C-X²²³-X²²⁴- (11b)

-X²¹⁴-C-X²¹⁵-X²¹⁶-X²¹⁷-X²¹⁸-X²¹⁹-X²²⁰-X²²¹-X²²²-C-X²²³- (11c)

-C-X²¹⁵-X²¹⁶-X²¹⁷-X²¹⁸-X²¹⁹-X²²⁰-X²²⁰-X²²²-C- (11d)
[1274] wherein,
   [1275] X²¹¹ is selected from an amino acid;
   [1276] X²¹² is selected from F, H, W, and Y;
   [1277] X²¹³ is selected from F, H, I, L, M, V, W, and Y;
   [1278] X²¹⁴ is P;
   [1279] X²¹⁵ is selected from F, H, W, and Y;
   [1280] X²¹⁶ is selected from F, I, L, M, V, W, and Y;
   [1281] X²¹⁷ is A;
   [1282] X²¹⁸ is selected from K, R, H, N, Q, S, T, and Y;
   [1283] X²¹⁹ is selected from F, I, L, M, V, W, and Y;
   [1284] X²²⁰ is G;
   [1285] X²²¹ is selected from D, E, H, N, Q, S, T, and Y;
   [1286] X²²² is L;
   [1287] X²²³ is D;
   [1288] X²²⁴ is selected from F, I, L, M, V, W, and Y; and
   [1289] X²²⁵ is selected from D and E; and
[1290] (b) the IL-2Rγc ligand comprises an amino acid sequence of Formula (5) (SEQ ID NO: 944), Formula (5a) (SEQ ID NO: 945), Formula (5b) (SEQ ID NO: 946), Formula (5c) (SEQ ID NO: 947), Formula (5d) (SEQ ID NO: 948), or Formula (5e) (SEQ ID NO: 1949), or an amino acid sequence having a greater than 60% sequence similarity to an amino acid sequence of Formula (5) (SEQ ID NO: 944), Formula (5a) (SEQ ID NO: 945), Formula (5b) (SEQ ID NO: 946), Formula (5c) (SEQ ID NO: 947), Formula (5d) (SEQ ID NO: 948), or Formula (5e) (SEQ ID NO: 949):

-X¹⁷¹-X¹⁷²-X¹⁷³-X¹⁷⁴-X¹⁷⁵-C-X¹⁷⁶-X¹⁷⁷-X¹⁷⁸-X¹⁷⁹-X¹⁸⁰-X¹⁸¹-X¹⁸²-X¹⁸³-C-X¹⁸⁴-X¹⁸⁵-X¹⁸⁶-X¹⁸⁷-X₁₈₈- (5)

-X¹⁷²-X¹⁷³-X¹⁷⁴-X¹⁷⁵-C-X¹⁷⁶-X¹⁷⁷-X¹⁷⁸-X¹⁷⁹-X¹⁸⁰-X¹⁸¹-X¹⁸²-X¹⁸³-C-X¹⁸⁴-X¹⁸⁸-X¹⁸⁶-X¹⁸⁷- (5a)

-X¹⁷³-X¹⁷⁴-X¹⁷⁵-C-X¹⁷⁶-X¹⁷⁷-X¹⁷⁸⁷-X¹⁷⁹-X¹⁸⁰-X¹⁸¹-X¹⁸²-X¹⁸³-C-X¹⁸⁴-X¹⁸⁵-X¹⁸⁶- (5b)

-X¹⁷⁴-X¹⁷⁵-C-X¹⁷⁶-X¹⁷⁷-X¹⁷⁸-X¹⁷⁹-X¹⁸⁰⁰-X¹⁸¹-X¹⁸²-X¹⁸³-C-X¹⁴-X¹⁸⁵- (5c)

-X¹⁷⁵-C-X¹⁷⁶-X¹⁷⁷-X¹⁷⁸-X¹⁷⁹-X¹⁸⁰-X¹⁸¹-X¹⁸²-X¹⁸³-C-X¹⁸⁴- (5d)

-C-X¹⁷⁶-X¹⁷⁷-X¹⁷⁸-X¹⁷⁹-X¹⁸⁰-X¹⁸¹-X¹⁸²-X¹⁸³-C- (5e)
[1291] wherein,
   [1292] X¹⁷¹ is selected from H, K, and R;
   [1293] X¹⁷² is selected from S, T, and Y;
   [1294] X¹⁷³ is selected from D, E, F, I, L, M, V, W, and Y;
   [1295] X¹⁷⁴ is selected from F, I, L, M, V, W, and Y;
   [1296] X¹⁷⁵ is selected from D, E, F, I, L, M, V, W, and Y;
   [1297] X¹⁷⁶ is selected from D, E, H, N, Q, S, T, and Y;
   [1298] X¹⁷⁷ is selected from D and E;
   [1299] X¹⁷⁸ is selected from F, H, I, L, M, V, W, and Y;
   [1300] X¹⁷⁹ is selected from D, E, H, N, Q, S, T, and Y;
   [1301] X¹⁸⁰ is G;
   [1302] X¹⁸¹ is V;
   [1303] X¹⁸² is E;
   [1304] X¹⁸³ is L;
   [1305] X¹⁸⁴ is selected from W;
   [1306] X¹⁸⁵ is selected from F, I, L, M, V, W, Y, H, N, Q, S, and T;
   [1307] X¹⁸⁶ is E;
   [1308] X¹⁸⁷ is selected from an amino acid; and
   [1309] X¹⁸⁸ is selected from D and E.

[1310] Aspect 124. The IL-2Rβγc ligand of aspect 123, wherein, the IL-2Rβ ligand comprises the amino acid sequence of SEQ ID NO: 865, or an amino acid sequence having a greater than 60% sequence similarity to SEQ ID NO: 865; and the IL-2Rγc ligand comprises the amino acid sequence of SEQ ID NO: 965, or an amino acid sequence having a greater than 60% sequence similarity to SEQ ID NO: 965.

[1311] Aspect 125. The IL-2Rβγc ligand of any one of aspects 123 to 124, wherein, the cysteines of the IL-2Rβ ligand are bound to each other by a disulfide bond; and the cysteines of the IL-2Rγc ligand are bound to each other by a disulfide bond.

[1312] Aspect 126. The IL-2Rβγc ligand construct of any one of aspects 123 to 125, wherein each of the at least one IL-2Rβ ligands and each of the at least one IL-2Rγc ligands are bound to the construct partner through a construct linker.

[1313] Aspect 127. The IL-2Rβγc ligand construct of any one of aspects 123 to 126, wherein each of the at least one IL-2Rβ ligands is the same, and each of the at least one IL-2Rγc ligands is the same.

[1314] Aspect 128. The IL-2Rβγc ligand construct of any one of aspects 123 to 127, wherein at least one of the IL-2Rβ ligands is different than at least one of the other IL-2Rβ ligands and/or at least one of the IL-2Rγc ligands is different than at least one of the other IL-2Rγc ligands.

[1315] Aspect 129. The IL-2Rβγc ligand construct of any one of aspects 123 to 128, wherein the construct partner comprises an Fc fragment, an immunoglobulin fragment, or an immunoglobulin.

[1316] Aspect 130. The IL-2Rβγc ligand construct of any one of aspects 123 to 128, wherein the construct partner comprises a polypeptide or a polymer.

[1317] Aspect 131. The IL-2Rβγc ligand construct of any one of aspects 123 to 130, further comprising at least one IL-2Rβγc ligand.

[1318] Aspect 132. A method of treating cancer in a patient comprising administering to a patient in need of such treatment a therapeutically effective amount of the IL-2Rβγc ligand of any one of aspects 1 to 155, the tandem IL-2Rβγc ligand of any one of aspects 56 to 63, the IL-2Rβγc ligand construct of any one of aspects 64 to 122, the IL-2Rβγc ligand construct of any one of aspects 123 to 131, or a combination of any of the foregoing.

[1319] Aspect 133. A method of treating an autoimmune disease in a patient comprising administering to a patient in need of such treatment a therapeutically effective amount of the IL-2Rβγc ligand of any one of aspects 1 to 155, the tandem IL-2Rβγc ligand of any one of aspects 56 to 63, the IL-2Rβγc ligand construct of any one of aspects 64 to 122, the IL-2Rβγc ligand construct of any one of aspects 123 to 131, or a combination of any of the foregoing.

[1320] Aspect 134. A method of treating an inflammatory disease in a patient comprising administering to a patient in need of such treatment a therapeutically effective amount of the IL-2Rβγc ligand of any one of aspects 1 to 155, the tandem IL-2Rβγc ligand of any one of aspects 56 to 63, the IL-2Rβγc ligand construct of any one of aspects 64 to 122, the IL-2Rβγc ligand construct of any one of aspects 123 to 131, or a combination of any of the foregoing.

[1321] Aspect 135. A method of expanding immune cells comprising contacting a population of immune cells ex vivo or in vivo with an effective amount of the IL-2Rβγc ligand of any one of aspects 1 to 155, the tandem IL-2Rβγc ligand of any one of aspects 56 to 63, the IL-2Rβγc ligand construct of any one of aspects 64 to 122, the IL-2Rβγc ligand construct of any one of aspects 123 to 131, or a combination of any of the foregoing.

[1322] Aspect 136. A method of cell therapy comprising engineering a cell to express the IL-2Rβγc ligand of any one of aspects 1 to 155 or the tandem IL-2Rβγc ligand of any one of aspects 56 to 63, such that the IL-2Rβγc ligand or tandem IL-2Rβγc ligand is express on the cell surface and/or secreted by the cell.

[1323] Aspect 137. A method of boosting a vaccine comprising administering to a patient a vaccine and a therapeutically effective amount of the IL-2Rβγc ligand of any one of aspects 1 to 155, the tandem IL-2Rβγc ligand of any one of aspects 56 to 63, the IL-2Rβγc ligand construct of any one of aspects 64 to 122, the IL-2Rβγc ligand construct of any one of aspects 123 to 131, or a combination of any of the foregoing.

[1324] Aspect 138. A method of modifying the immune response comprising administering to a patient an effective amount of the IL-2Rβγc ligand of any one of aspects 1 to 155, the tandem IL-2Rβγc ligand of any one of aspects 56 to 63, the IL-2Rβγc ligand construct of any one of aspects 64 to 122, the IL-2Rβγc ligand construct of any one of aspects 123 to 131, or a combination of any of the foregoing.

[1325] Aspect 139. A pharmaceutical composition comprising the IL-2Rβγc ligand of any one of aspects 1 to 155, the tandem IL-2Rβγc ligand of any one of aspects 56 to 63, the IL-2Rβγc ligand construct of any one of aspects 64 to 122, the IL-2Rβγc ligand construct of any one of aspects 123 to 131, or a combination of any of the foregoing.

[1326] Aspect 140. The pharmaceutical composition of aspect 139, further comprising a chemotherapeutic agent, an immunomodulator, a checkpoint inhibitor, a vaccine, or a combination of any of the foregoing.

[1327] Aspect 141. A nucleic acid encoding for the IL-2Rβγc ligand of any one of aspects 1 to 155, the tandem IL-2Rβγc ligand of any one of aspects 56 to 63, the IL-2Rβγc ligand construct of any one of aspects 64 to 122, and/or the IL-2Rβγc ligand construct of any one of aspects 123 to 131.

[1328] Aspect 142. A nucleic acid encoding for an IL-2Rβ ligand, wherein the IL-2Rβ ligand comprises an amino acid sequence selected from of any one of SEQ ID NOS: 805-903, or an amino acid sequence having greater than 60% amino acid sequence similarity to any one of SEQ ID NOS: 805-903.

[1329] Aspect 143. A nucleic acid encoding for an IL-2Rβ ligand, wherein the IL-2Rβ ligand comprises an amino acid sequence selected from any one of SEQ ID NOS: 612, 664, 865, 856, 858, 864, 869, 870, 874, 875, and 901, or an amino acid sequence having greater than 60% amino acid sequence similarity to any one of SEQ ID NOS: 612, 664, 865, 856, 858, 864, 869, 870, 874, 875, and 901.

[1330] Aspect 144. A nucleic acid encoding for the IL-2Rγc ligand, wherein the IL-2Rγc ligand comprises an amino acid sequence selected from any one of SEQ ID NOS: 944-1028, or an amino acid sequence having greater than 60% amino acid sequence similarity to any one of SEQ ID NOS: 944-1028.

[1331] Aspect 145. A nucleic acid encoding for the IL-2Rγc ligand, wherein the IL-2Rγc ligand comprises an amino acid sequence selected from any one of SEQ ID NOS: 965, 980, 981, 985, 1024, and 1026, or an amino acid sequence having greater than 60% amino acid sequence similarity to any one of SEQ ID NOS: 965, 980, 981, 985, 1024, 1026, and 1028.

[1332] Aspect 146. A nucleic acid encoding for the IL-2Rβγc ligand of any one of aspects 1 to 155.

[1333] Aspect 147. The nucleic acid of aspect 146, wherein the IL-2Rβγc ligand comprises: an IL-2RP ligand comprising the amino acid sequence of SEQ ID NO: 865, or an amino acid sequence having greater than 60% amino acid sequence similarity to SEQ ID NO: 865; and an IL-2Rγc ligand comprising the amino acid sequence of SEQ ID NO: 965, or an amino acid sequence having greater than 60% amino acid sequence similarity to SEQ ID NO: 865.

[1334] Aspect 148. The nucleic acid of aspect 146, wherein the IL-2Rβγc ligand comprises an amino acid sequence comprising SEQ ID NO: 1205, or an amino acid sequence having greater than 60% amino acid sequence similarity to SEQ ID NO: 1205.

[1335] Aspect 149. A nucleic acid encoding for the tandem IL-2Rβγc ligand of any one of aspects 56 to 63, wherein, each of the IL-2Rβγc ligand linkers independently comprises a peptidyl IL-2Rβγc ligand linker; and each of the tandem linkers independently comprises a peptidyl tandem linker.

[1336] Aspect 150. A nucleic acid encoding for the IL-2Rβγc ligand construct of any one of aspects 64 to 122, wherein the construct linker comprises a peptidyl construct linker.

[1337] Aspect 151. A nucleic acid encoding for the IL-2Rβγc ligand construct of aspect 150, wherein the IL-2Rβγc ligand construct comprises an amino acid sequence having greater than 60% amino acid sequence similarity to any one of SEQ ID NOS: 1202-1252.

[1338] Aspect 152. A nucleic acid encoding for the IL-2Rβγc ligand construct, wherein the IL-2Rβγc ligand construct comprises an amino acid sequence selected from of any one of SEQ ID NOS: 1202-1252.

[1339] Aspect 153. A nucleic acid encoding for the IL-2Rβγc ligand construct of any one of aspects 123 to 131.

[1340] Aspect 1A. An IL-2Rβ ligand, wherein the IL-2Rβ ligand comprises an amino acid sequence of any one of Formula (1)-(1d), Formula (2)-(2d), Formula (3)-(3e), and Formula (4)-(4f), a truncated amino acid sequence of any of the foregoing, a substituted amino acid sequence of any of the foregoing, any of the foregoing amino acid sequences having flanking amino acids, and an amino acid sequence having greater than 60% sequence similarity to any of the foregoing.

[1341] Aspect 2A. An IL-2Rβ ligand, wherein the IL-2Rβ ligand comprises an amino acid sequence of any one of SEQ ID NOS: 805-903, 911-930, 2575-2655, 2661-2891, 2900-2926, and 2929-2939, a truncated amino acid sequence of any of the foregoing, a substituted amino acid sequence of any of the foregoing, any of the foregoing amino acid sequences having flanking amino acids, and an amino acid sequence having greater than 60% sequence similarity to any of the foregoing.

[1342] Aspect 3A. An IL-2Rβ ligand, wherein the IL-2Rβ ligand comprises an amino acid sequence of any one of Formula (1)-(1d), Formula (2)-(2d), Formula (3)-(3e), or Formula (4)-(4f).

[1343] Aspect 4A. An IL-2Rβ ligand, wherein the IL-2Rβ ligand comprises an amino acid sequence of any one of SEQ ID NOS: 805-903, 911-930, 2575-2655, 2661-2891, 2900-2926, or 2929-2939.

[1344] Aspect 5A. An IL-2Rβ ligand, wherein the IL-2Rβ ligand comprises an amino acid sequence of SEQ ID NO: 865, a truncated amino acid sequence thereof, a substituted amino acid sequence of any of the foregoing, any of the foregoing amino acid sequences having flanking amino acids, and an amino acid sequence having greater than 60% sequence similarity to any of the foregoing.

[1345] Aspect 6A. The IL-2Rβ ligand of any one of aspects 1A to 5A, wherein the IL-2Rβ ligand comprises a disulfide bond between the two cysteines of the IL-2Rβ ligand.

[1346] Aspect 7A. The IL-2Rβ ligand of any one of aspects 1A to 6A, wherein the IL-2Rβ ligand binds to the specific binding site of the IL-2Rβ subunit with an IC50 less than 100 μM as determined using phage ELISA competition assays.

[1347] Aspect 8A. The IL-2Rβ ligand of any one of aspects 1A to 7A, wherein the IL-2Rβ ligand exhibits an EC₅₀ for STAT5 phosphorylation in TF-1β cells and/or NK-92 cells of less than 100 μM.

[1348] Aspect 9A. The IL-2Rβ ligand of any one of aspects 1A to 8A, wherein the IL-2Rβ ligand binds to the hIL-2Rβ subunit with an IC50 less than 100 μM as determined using phage ELISA competition assays.

[1349] Aspect 10A. The IL-2Rβ ligand of any one of aspects 1A to 9A, wherein the IL-2Rβ ligand binds to the cyno-IL-2Rβ subunit with an IC50 less than 100 μM as determined using phage ELISA competition assays.

[1350] Aspect 11A. An IL-2Rγc ligand, wherein the IL-2Rγc ligand comprises an amino acid sequence of any one of Formula (5)-(5e); a truncated amino acid sequence of any of the foregoing, a substituted amino acid sequence of any of the foregoing, any of the foregoing amino acid sequences having flanking amino acids, and an amino acid sequence having greater than 60% sequence similarity to any of the foregoing.

[1351] Aspect 12A. An IL-2Rγc ligand, wherein the IL-2Rγc ligand comprises an amino acid sequence of any one of SEQ ID NOS: 944-1028, 1032-1060, and 1601-1613; a truncated amino acid sequence of any of the foregoing, a substituted amino acid sequence of any of the foregoing, any of the foregoing amino acid sequences having flanking amino acids, and an amino acid sequence having greater than 60% sequence similarity to any of the foregoing.

[1352] Aspect 13A. An IL-2Rγc ligand, wherein the IL-2Rγc ligand comprises an amino acid sequence of any one of Formula (5)-(5e).

[1353] Aspect 14A. An IL-2Rγc ligand, wherein the IL-2Rγc ligand comprises an amino acid sequence of any one of SEQ ID NOS: 944-1028, 1032-1060, and 1601-1613.

[1354] Aspect 15A. An IL-2Rγc ligand, wherein the IL-2Rγc ligand comprises an amino acid sequence of SEQ ID NO: 965, a truncated amino acid sequence thereof, a substituted amino acid sequence of any of the foregoing, any of the foregoing amino acid sequences having flanking amino acids, and an amino acid sequence having greater than 60% sequence similarity to any of the foregoing.

[1355] Aspect 16A. The IL-2Rγc ligand of any one of aspects 11A to 15A, wherein the IL-2Rγc ligand comprises a disulfide bond between the two cysteines of the IL-2Rγc ligand.

[1356] Aspect 17A. The IL-2Rγc ligand of any one of aspects 11A to 16A, wherein the IL-2Rγc ligand binds to the specific binding site of the IL-2Rγc subunit with an IC50 less than 100 μM as determined using phage ELISA competition assays.

[1357] Aspect 18A. The IL-2Rγc ligand of any one of aspects 11A to 17A, wherein the IL-2Rγc ligand exhibits an EC50 for STAT5 phosphorylation in TF-1β cells and/or NK-92 cells of less than 100 μM.

[1358] Aspect 19A. The IL-2Rγc ligand of any one of aspects 11A to 18A, wherein the IL-2Rγc ligand binds to the hIL-2Rγc subunit with an IC50 less than 100 μM as determined using phage ELISA competition assays.

[1359] Aspect 20A. The IL-2Rγc ligand of any one of aspects 11A to 19A, wherein the IL-2Rγc ligand binds to the cyno-IL-2Rγc subunit with an IC50 less than 100 μM as determined using phage ELISA competition assays.

[1360] Aspect 21A. An IL-2Rβγc binding compound wherein the IL-2Rβγc binding compound comprises: the IL-2Rβ ligand of any one of aspects 1A to 10A; and the IL-2Rγc ligand of any one of aspects 11A to 20A.

[1361] Aspect 22A. The IL-2Rβγc binding compound of aspect 21A, wherein the IL-2Rβγc binding compound comprises an IL-2Rβγc ligand, wherein the 2Rβγc ligand comprises: a ligand linker; the IL-2RP ligand bound to the ligand linker; and the IL-2Rγc ligand bound to the ligand linker.

[1362] Aspect 23A. The IL-2Rβγc binding compound of aspect 22A, wherein the IL-2Rβγc ligand comprises a disulfide bond between two cysteines of the IL-2Rβγc ligand.

[1363] Aspect 24A. The IL-2Rβγc binding compound of any one of aspects 21A to 22A, wherein the IL-2Rβ ligand and the IL-2Rγc ligand are bonded to the ligand linker in an C/C orientation, an C/N orientation, an N/C orientation, or an N/N orientation.

[1364] Aspect 25A. The IL-2Rβγc binding compound of any one of aspects 21A to 24A, wherein the ligand linker comprises a peptidyl ligand linker.

[1365] Aspect 26A. The IL-2Rβγc binding compound of any one of aspects 21A to 24A, wherein the ligand linker comprises a chemical ligand linker.

[1366] Aspect 27A. The IL-2Rβγc binding compound of any one of aspects 21A to 24A, wherein the ligand linker comprises (G)ₙ (SEQ ID NO: 9380), (GS)ₙ (SEQ ID NO: 9381), (GGS)ₙ (SEQ ID NO: 9382). (GGGS)ₙ (SEQ ID NO: 9383), or (GGGGS)ₙ (SEQ ID NO: 9384), wherein n is an integer from 1 to 20.

[1367] Aspect 28. A The IL-2Rβγc binding compound of any one of aspects 21A to 24A, wherein the IL-2Rβγc ligand comprises an amino acid sequence of any one of SEQ ID NOS: 1263-1270, 4070-4085, and 4090 to 4099, a truncated amino acid sequence of any of the foregoing, a substituted amino acid sequence of any of the foregoing, any of the foregoing amino acid sequences having flanking amino acids, and an amino acid sequence having greater than 60% sequence similarity to any of the foregoing.

[1368] Aspect 29A. The IL-2Rβγc binding compound of any one of aspects 21A to 24A, wherein the IL-2Rβγc ligand comprises an amino acid sequence of any one of SEQ ID NOS: 1263-1270, 4070-4085, and 4090 to 4099.

[1369] Aspect 30A. The IL-2Rβγc binding compound of any one of aspects 21A to 29A, wherein the IL-2Rβγc ligand is a full IL-2R agonist or a partial IL-2R agonist.

[1370] Aspect 31A. The IL-2Rβγc binding compound of any one of aspects 21A to 30A, wherein the IL-2Rβγc ligand exhibits an EC₅₀ for STAT5 phosphorylation in TF-1β cells and/or NK-92 cells of less than 100 μM.

[1371] Aspect 32A. The IL-2Rβγc binding compound of any one of aspects 21A to 31A, wherein the IL-2Rβγc ligand binds to hIL-2R with an IC50 less than 100 μM as determined using phage ELISA competition assays.

[1372] Aspect 33A. The IL-2Rβγc binding compound of any one of aspects 21A to 32A, wherein the IL-2Rβγc ligand binds to cyno-IL-2R with an IC50 less than 100 μM as determined using phage ELISA competition assays.

[1373] Aspect 34A. The IL-2Rβγc binding compound of aspect 21A, wherein the IL-2Rβγc binding compound comprises a construct partner, wherein the IL-2Rβ ligand and the IL-2Rγc ligand are bound to the construct partner.

[1374] Aspect 35A. The IL-2Rβγc binding compound of any one of aspects 22A to 33A, wherein the IL-2Rβγc binding compound comprises the IL-2Rβγc ligand, and the IL-2Rβγc ligand is bound to the construct partner.

[1375] Aspect 36A. The IL-2Rβγc binding compound of aspect 35A, wherein the IL-2Rβγc ligand is bonded to the construct partner through the C-terminus or through the N-terminus of the IL-2Rβγc ligand.

[1376] Aspect 37A. The IL-2Rβγc binding compound of any one of aspects 35A to 36A, wherein in the IL-2Rβγc ligand is bound to the construct partner through a construct linker.

[1377] Aspect 38A. The IL-2Rβγc binding compound of aspect 37A, wherein the construct linker comprises a peptidyl ligand linker.

[1378] Aspect 39A. The IL-2Rβγc binding compound of aspect 37A, wherein the construct linker comprises a chemical ligand linker.

[1379] Aspect 40A. The IL-2Rβγc binding compound of aspect 37A, wherein the construct linker comprises (G)ₙ (SEQ ID NO: 9380), (GS)ₙ (SEQ ID NO: 9381), (GGS)ₙ (SEQ ID NO: 9382). (GGGS)ₙ (SEQ ID NO: 9383), or (GGGGS)ₙ (SEQ ID NO: 9384), wherein n is an integer from 1 to 20.

[1380] Aspect 41A. The IL-2Rβγc binding compound of any one of aspects 34A to 40A, wherein the construct partner is selected from a polymer, a polypeptide, an Fc-fragment, an immunoglobulin fragment, and an antibody.

[1381] Aspect 42A. The IL-2Rβγc binding compound of any one of aspects 34A to 40A, wherein the construct partner is selected from human serum albumin, a polypeptide, and a polyethylene glycol.

[1382] Aspect 43A. The IL-2Rβγc binding compound of any one of aspects 34A to 40A, wherein the construct partner comprises a viral surface antigen or a virus-like particle.

[1383] Aspect 44A. The IL-2Rβγc binding compound of any one of aspects 34A to 40A, wherein the construct partner comprises a cytokine.

[1384] Aspect 45A. The IL-2Rβγc binding compound of any one of aspects 34A to 40A, wherein the compound comprises a recombinant fusion protein.

[1385] Aspect 46A. The IL-2Rβγc binding compound of aspect 45A, wherein the recombinant fusion protein is selected from a hIgG-Fc recombinant fusion protein and a hIgG1-Fc recombinant fusion protein.

[1386] Aspect 47A. The IL-2Rβγc binding compound of any one of aspects 34A to 40A, wherein the construct partner comprises an antibody and the antibody is directed to a tumor antigen.

[1387] Aspect 48A. The IL-2Rβγc binding compound of any one of aspects 34A to 40A, wherein the construct partner comprises a cell-targeting moiety.

[1388] Aspect 49A. The IL-2Rβγc binding compound of aspect 48A, wherein cell-targeting moiety comprises a tumor-targeting moiety, an immune cell-targeting moiety, or a combination thereof.

[1389] Aspect 50A. The IL-2Rβγc binding compound of aspect 35A, wherein the IL-2Rβγc binding compound comprises an amino acid sequence of any one of SEQ ID NOS: 1212-1252 and 8061-8082, a truncated amino acid sequence of any of the foregoing, a substituted amino acid sequence of any of the foregoing, any of the foregoing amino acid sequences having flanking amino acids, and an amino acid sequence having greater than 60% sequence similarity to any of the foregoing.

[1390] Aspect 51A. The IL-2Rβγc binding compound of any one of aspects 34A to 50A, wherein the IL-2Rβγc binding compound is a full IL-2R agonist or a partial IL-2R agonist.

[1391] Aspect 52A. The IL-2Rβγc binding compound of any one of aspects 34A to 51A, wherein the IL-2Rβγc binding compound exhibits an EC₅₀ for STAT5 phosphorylation in TF-1β cells and/or NK-92 cells of less than 100 μM.

[1392] Aspect 53A. The IL-2Rβγc binding compound of any one of aspects 34A to 52A, wherein the IL-2Rβγc binding compound binds to hIL-2R with an IC50 less than 100 μM as determined using phage ELISA competition assays.

[1393] Aspect 54A. The IL-2Rβγc binding compound of any one of aspects 34A to 53A, wherein the IL-2Rβγc binding compound binds to cyno-IL-2R with an IC50 less than 100 μM as determined using phage ELISA competition assays.

[1394] Aspect 55A. A pharmaceutical composition comprising the IL-2Rβγc binding compound of any one of aspects 21A to 54A.

[1395] Aspect 56A. The pharmaceutical composition of aspect 55A, further comprising a chemotherapeutic agent, an immunomodulator, a checkpoint inhibitor, a vaccine, or a combination of any of the foregoing.

[1396] Aspect 57A. A method of treating a disease in a patient comprising administering to a patient in need of such treatment a therapeutically effective amount of the IL-2Rβγc binding compound of any one of aspects 21A to 54A, or the pharmaceutical composition of any one of aspects 55A to 56A.

[1397] Aspect 58A. The method of aspect 57A, wherein the disease is selected from cancer, an autoimmune disease, an inflammatory disease, an infectious disease, and a viral disease.

[1398] Aspect 59A. A method of expanding immune cells comprising contacting a population of immune cells ex vivo or in vivo with an effective amount of the IL-2Rβ ligand of any one of aspects 1A to 10A, the IL-2Rγc ligand of any one of aspects 11A to 20A, or the IL-2Rβγc binding compound of any one of aspects 21A to 54A.

[1399] Aspect 60A. A method of cell therapy comprising engineering a cell to express the IL-2Rβγc binding compound of any one of aspects 21A to 54A.

[1400] Aspect 61A. A method of boosting a vaccine comprising administering to a patient a vaccine and a therapeutically effective amount of the IL-2Rβγc binding compound of any one of aspects 21A to 54A, or the pharmaceutical composition of any one of aspects 55A to 56A.

[1401] Aspect 62A. A method of modifying the immune response comprising administering to a patient an effective amount of the IL-2Rβγc binding compound of any one of aspects 21A to 54A, or the pharmaceutical composition of any one of aspects 55A to 56A.

[1402] Aspect 63A. A nucleic acid encoding for the IL-2Rβ ligand of any one of aspects 1A to 10A, the IL-2Rγc ligand of any one of aspects 11A to 21A, or the IL-2Rβγc binding compound of any one of aspects 22A to 54A.

### EXAMPLES

[1403] The following examples describe in detail methods of synthesizing IL-2Rβγc ligands, methods of synthesizing IL-2Rβγc constructs, and methods of determining the activity of IL-2Rβγc ligands and IL-2Rβγc ligand constructs provided by the present disclosure. The following examples also describe in detail methods for determining properties of the IL-2Rβγc ligands and IL-2Rβγc constructs provided by the present disclosure. It will be apparent to those skilled in the art that many modifications, both to materials and methods, may be practiced without departing from the scope of the invention.

[1404] In the examples, the IL-2Rβ subunit refers to human IL-2Rβ (CD122 protein, Fc Tag) (27-239), Accession No. NP_000869.1 and was obtained from ACRObiosystems, Inc., product number ILB-H5253.

[1405] The IL-2Rγc subunit refers to human IL-2Rγc (CD132 protein, Fc Tag) (23-254), Accession No. AAH14972 and was obtained from ACRObiosystems, Inc., product number ILG-H5256.

[1406] The cyano-IL-2Rβ subunit refers to the cynomolgus monkey IL-2Rβ subunit, Accession No. NP_000869.1 and was obtained from Sino Biological Inc., product number 90328-C02H.

[1407] In the examples, the IL-2Rγc subunit refers to the cynomolgus monkey Rγc subunit, Accession No. XP_005503949.1

### Example 1

### Synthesis of IL-2Rβ Ligands, IL-2Rγc Ligands and Peptidyl IL-2Rβγc Ligands

[1408] IL-2Rβ ligands, IL-2Rγc ligands, and peptidyl IL-2Rβγc ligands were synthesized by single chain solid phase synthesis.

[1409] 2-Cholorotrityl resin (1 g, 1.5 mmole/g, from Anaspec) was washed with DMF (2×), and then allowed to stand in 50 mL DMF for 10 min. The swollen resin was treated with an activated solution of Fmoc-glycine prepared from 5 eq. of amino acid and 5 eq. of HATU dissolved at 0.5M in DMF, followed by the addition of 10 eq. of DIEA, and the mixture gently stirred for 30 min at 25° C. The resin was washed (DMF, THF, DCM, and MeOH) and dried to yield the Fmoc-protected resin. Fmoc groups were then removed by gently shaking the resin with 30% piperidine in DMF for 20 min, followed by washing (DMF, THF, DCM, and MeOH), and drying. The resin was then subjected to repeated cycles of Fmoc-amino acid couplings with HATU activation and Fmoc removal with piperidine to build a desired amino acid sequence. Except for the four cysteine residues of the sequence, standard 95% TFA-labile amino acid side-chain protecting groups were used. For the two cysteine residues proximal to the resin, Trt protection was used, and for the two cysteine residues distal to the resin, Acm protection was used. After Fmoc removal from the final amino acid of the dimer sequence, the terminal amine groups were acylated with acetic anhydride (10 eq.) and DIEA (20 eq.) in DMF for 20 min, followed by washing as described above.

[1410] The completed peptide was cleaved from the resin by suspension in a solution of TFA (95 vol %), water (2.5 vol %), and triisopropylsilane (2.5 vol %) for 3 h at 25° C. The TFA solution was cooled to 5° C. and poured into Et₂O to precipitate the peptide. Filtration and drying under reduced pressure gave the desired peptide. Purification via preparative HPLC with a C18 column afforded the pure peptide with the two C-terminal thiol groups in a reduced state. This peptide was dissolved in 20% DMSO/water (1 mg dry weight peptide/mL) and allowed to stand at 25° C. for 36 h, and then purified by reverse phase HPLC to provide the peptide with the two C-terminal thiols linked by a disulfide bridge. The two N-terminal Acm-protected cysteine residues were then deprotected by dissolving 0.1 mmole of peptide in 25 mL of 50% acetic acid/H₂O and 2.5 mL of 1M HCl and adding 5 mL of 0.1M iodine (in glacial acetic acid; 5 eq.) dropwise with stirring under a nitrogen atmosphere. The deprotection/oxidation reaction was allowed to proceed for 2 h at 25° C. with frequent monitoring (analytical HPLC) to ensure complete reaction. The reaction was stopped by addition of ice-cooled diethyl ether (9 volume eq.). The resulting solution was cooled on dry ice (3 min), the ether solution carefully decanted, and the resulting light-yellow solid purified by preparative reverse phase HPLC (95%) to yield the final single-chain peptide dimer.

### Example 2

### Synthesis of IL-2Rβγc Ligands Using Click Chemistry

[1411] The peptide sequences of an IL-2Rβ ligand and an IL-2Rγ ligand were synthesized separately using standard solid phase synthesis conditions and Fmoc-protected amino acids as described in Example 1.

[1412] Rink amide-MBHA resin (1 g, 1.5 mmole/g, Anaspec) was washed with DMF (2×), and then allowed to stand in 50 mL DMF for 10 min. Separate portions of the swollen resin were treated with either an activated solution of Fmoc-propargyl glycine (IL-2Rβ ligand) or 2-(Fmoc-NH)-5-azido-pentanoic acid (IL-2Rγc ligand) prepared from 5 eq. of amino acid and 5 eq. of HATU dissolved at 0.5M in DMF, followed by the addition of 10 eq. of DIEA, and the mixture was gently stirred for 30 min at 25° C. The resin was washed (DMF, THF, DCM, and MeOH) and dried to yield the Fmoc-protected resin. Fmoc groups were then removed by gently shaking the resin in 30% piperidine in DMF for 20 min, followed by washing (DMF, THF, DCM, and MeOH), and drying. The resin was then subjected to repeated cycles of Fmoc-amino acid couplings with HATU activation and Fmoc removal with piperidine to provide a desired IL-2Rβ ligand amino acid sequence and a desired IL-2Rβγc ligand amino acid sequence. Standard 95% TFA-labile amino acid sidechain protecting groups were used for all residues. After Fmoc removal from the final amino acid of each ligand sequence, the terminal amine groups were acylated with acetic anhydride (10 eq.) and DIEA (20 eq.) in DMF for 20 min.

[1413] Each completed ligand was cleaved from the resin by suspension in a solution of TFA (95%), water (2.5%), and triisopropylsilane (2.5%) for 3 h at 25° C. The TFA solution was cooled to 5° C. and poured into Et₂O to precipitate the peptide. Filtration and drying under reduced pressure gave the desired ligands. Purification via preparative HPLC with a C18 column afforded the pure peptides with the two thiol groups in a reduced state. The ligands were separately dissolved in 20% DMSO/water (1 mg dry weight peptide/mL), allowed to stand at 25° C. for 36 h., and then purified by reverse phase HPLC to provide the IL-2Rβ and IL-2Rγc ligands with the two thiols linked via an intramolecular disulfide bridge.

[1414] Two-tenths (0.2) mL of a 2.0 mM solution of purified alkyne-containing IL-2Rβ ligand was prepared by dissolving the ligand in 1:1 H₂O/tBuOH. Similarly, 0.2 mL of a 2.4 mM solution of the purified azide-containing ligand was prepared using the same solvent. The two ligand solutions along with 0.1 mL of 100 mM CuSO₄ in H₂O, 0.1 mL of 250 mM of a Cu(I) chelating agent such as DIEPA, pyridine, or THPTA (tris(3-hydroxypropyltriazolylmethyl)amine), in 3:1 DMSO/tBuOH, 0.1 mL of 0.5 M ascorbic acid in H₂O, and 0.3 mL of 3:2 tBuOH/H₂O were combined, and the reaction allowed to proceed at 45° C. under anaerobic conditions. Reaction progress was monitored frequently by LC/MS, and additional azide-containing ligand and CuSO₄ were added to drive the reaction to completion. After the maximal amount of alkyne was consumed (approx. 3 h), the reaction was quenched by addition of approx. 8 mL of 1:1 H₂O/ACN, and the peptide dimer purified (95%) using a preparative-scale C18 HPLC column.

[1415] The structure of IL-2Rβ ligands and IL-2Rγc ligands used in the experimental examples is provided in Tables 8 and 9, and in FIGS. 19A-19C.

TABLE 8
IL-2Rβ Ligands.

| | |
|---|---|
| SEQ ID NO: 58 | Y D C R I A Q V G E L C D L |
| SEQ ID NO: 671 | V Q Y K K C W M A Q L G D L C E L D P S |
| SEQ ID NO: 664 | Y P C H M A Q L G E L C D L W s W G D I |
| SEQ ID NO: 612 | Y P C W M A Q L G E L C D L |
| SEQ ID NO: 865 | W Y P C W M A Q L G E L C D L D |
| SEQ ID NO: 869 | F Y P C W T A L L G E L C D L E P G P P A M |
| SEQ ID NO: 870 | W G T T W R W Y P C W M A Q L G E L c D L E |
| SEQ ID NO: 864 | D V L G D R W Y P C W I A K L G E L c D L D |
| SEQ ID NO: 874 | W Y P C W I A Q L G E L C D L D |
| SEQ ID NO: 875 | W Y P C W L A K L G E L C D L D |
| SEQ ID NO: 901 | W Y P C W M A Q L G D L C D L E K P V T E R |
| SEQ ID NO: 856 | W R R W Y P C W V A Q V G E L C D L E I E A |
| SEQ ID NO: 858 | R Q R W Y P C W M A R L G E L C D L D E P T |

TABLE 9
IL-2Rγc Ligands.

| | |
|---|---|
| SEQ ID NO: 222 | V M C E R W Q G V E L C W L |
| SEQ ID NO: 224 | D C S M W E G V E L C W |
| SEQ ID NO: 965 | V V C Q D W E G V E L C W Q |
| SEQ ID NO: 985 | W S K K A E V V C E E W G G V E F |
| | C W I |
| SEQ ID NO: 1024 | R T G V E C Q D W H G V E L C W P |
| | V W E |
| SEQ ID NO: 1028 | V G I E C E E W A G V E L C W L |
| SEQ ID NO: 981 | T W N M S E L E C Q D W N G V E I |
| | C W H |
| SEQ ID NO: 1026 | R T E V E C E D W E G V E L C W L |

### Example 3

### STAT5 Phosphorylation in TF-1β Cells with IL-2Rβγc Ligands Having Different Ligands/Orientations/Linkers

[1416] IL-2Rβγc ligands were evaluated for induction of STAT5 phosphorylation in TF-1β cells. TF-10 cells were derived from the growth factor-dependent human erythroleukemia cell line TF-1 (ATCC #CRL-2003), which naturally expresses IL-2Rγc but not IL-2Rβ. The cells were engineered to be IL-2 responsive by transfection with human full-length IL-2Rβ. A cell line expressing higher levels of IL-2Rβ was selected by growth in IL-2, and both IL-2Rβ and IL-2Rγc subunit expression levels were verified by qPCR and FACS analysis.

[1417] To test compounds for induction of STAT5 phosphorylation TF-1β cells were starved overnight at 5×10⁵ cells/mL in starvation medium (RPMI 1640+2.5 g/L glucose+5% FBS+2 mM L-glutamine+1 mM NaPyr+10 mM HEPES with no GM-CSF or rhIL-2 supplement) in T75 flasks. The following day, cells were plated in 96-well V-bottom plates at 2×10⁵ cells/well. Three-fold serial dilutions of IL-2Rβγc ligands or IL-2 in starvation media were added to the cells and incubated for 30 min at 37° C. Cell extracts were prepared by adding a mixture of 10× Cell Lysis Buffer (Cell Signaling Technology #9803) and 1×HALT Phosphatase and Protease Inhibitor Cocktail (Thermo Fisher #78442) directly to the wells. The plates were agitated at 25° C. for 5 min to prepare cell extracts for immediate use or stored at −80° C. Detection of pSTAT5 was performed using a PathScan® Phospho-Stat5 (Tyr694) Sandwich ELISA Kit (Cell Signaling Technology #7113). Cell extracts were added to microwells that were pre-coated with a mouse anti-phospho-STAT5 antibody and incubated overnight at 4° C. Wells were then washed with PBS and bound phospho-STAT5 (Tyr694) was detected by adding a rabbit anti-STAT5 detection antibody and incubating for 1 h at 37° C. Wells were washed with PBS and an anti-rabbit IgG HRP-linked antibody was added to each well. After a final wash TMB substrate solution was added to measure the amount of HRP in each well. Absorbance at 450 nm was read in a microplate reader. The signal that was produced is proportional to the quantity of phosphorylated STAT5 in each cell extract.

[1418] The results are presented in FIG. 2.

[1419] The structures of the IL-2Rβγc ligands evaluated in FIG. 2 are provided in FIGS. 19A-19C.

### Example 4

### STAT5 Phosphorylation in NK-92 Cells with IL-2Rβγc Ligands Having Different IL-2Rβ and IL-2Rγc Ligands with a C/C Orientation and with the Same Ligand Linker

[1420] IL-2Rβγc ligands were evaluated for induction of STAT5 phosphorylation in NK-92 cells, a human cell line that expresses all three IL-2 receptor subunits, and which is responsive to IL-2Rβγc-biased variants as well as wild type IL-2. To test compounds for induction of STAT5 phosphorylation, NK-92 cells were starved overnight in starvation medium (RPMI 1640+20% FBS+2 mM L-glutamine+1 mM NaPyr+10 mM HEPES+0.1 mM BME with no rhIL-2 supplement) at 37° C. in T75 flasks. The following day, the NK-92 cells were plated in 96-well V-bottom plates at 2×10⁵ cells/well. Three-fold serial dilutions of test compounds or IL-2 in starvation media were added to the cells and incubated for 30 min at 37° C.

[1421] Cell extracts were prepared and the amount of phosphorylated STAT5 was measured using the PathScan® Phospho-Stat5 (Tyr694) Sandwich ELISA Kit as described in Example 3.

[1422] The results are presented in FIG. 3.

[1423] The structures of the IL-2Rβγc ligands evaluated in FIG. 3 are provided in FIGS. 19A-19C.

### Example 5

### STAT5 Phosphorylation in NK-92 Cells with IL-2Rβγc Ligands Having Different Orientations

[1424] The agonist activity of IL-2Rβγc ligands comprising the same IL-2Rβ and IL-2Rγc ligands bound to the same ligand linker but with different N/C orientations was evaluated using a STAT5 phosphorylation assay in NK-92 cells.

[1425] IL-2Rβγc ligands were incubated with NK-92 cells and STAT5 phosphorylation measured as a function of concentration using the methods described in Example 4.

[1426] The results are presented in FIG. 4.

[1427] The structures of the IL-2Rβγc ligands evaluated in FIG. 4 are provided in FIGS. 19A-19C.

### Example 6

### STAT5 Phosphorylation in TF-1β Cells with IL-2Rγc Ligands with Different Ligands

[1428] The agonist activity of IL-2Rβγc ligands comprising different IL-2Rβ and IL-2Rγc ligands bound to the same synthetic ligand linker and with the same N/C orientation was evaluated using a STAT5 phosphorylation assay in TF-1β cells.

[1429] Compounds were incubated with TF-13 cells and STAT5 phosphorylation was measured as a function of concentration using the methods described in Example 3.

[1430] The results are presented in FIGS. 5A and 5B.

[1431] The structures of the IL-2Rβγc ligands evaluated in FIGS. 5A and 5B are provided in FIGS. 19A-19C.

### Example 7

### STAT5 Phosphorylation in NK-92 Cells with IL-2Rβγc Ligands with Different Linkers

[1432] The agonist activity of IL-2Rβγc ligands comprising the same IL-2Rβ and IL-2Rγc ligands bound to a synthetic IL-2Rβγc ligand linker (IL-2Rβγc ligand (BGL20)) or to a peptidyl IL-2Rβγc ligand linker (IL-2Rβγc ligand (BGL21)) and with the same N/C orientation was evaluated using a STAT5 phosphorylation assay in NK-92 cells.

[1433] IL-2Rβγc ligands were incubated with NK-92 cells and STAT5 phosphorylation was measured as a function of concentration using the methods described in Example 4.

[1434] The results are presented in FIG. 6.

[1435] The structures of the IL-2Rβγc ligands evaluated in FIG. 6 are provided in FIGS. 19A-19C.

### Example 8

### STAT5, AKT and ERK1/2 Phosphorylation in NK-92 Cells with IL-2 and an IL-2Rβγc Ligand

[1436] The agonist activity of IL-2 and an IL-2Rβγc ligand (BGL21) was evaluated using STAT5 phosphorylation, AKT phosphorylation, and ERK1/2 phosphorylation assays in NK-92 cells.

[1437] Compounds were incubated with NK-92 cells and STAT5 phosphorylation was measured as a function of concentration using the methods described in Example 4. Detection of phosphorylated AKT was performed using the PathScan® Phospho-AKT (Thr308) Sandwich ELISA Kit (Cell Signaling Technology #7252). Detection of phosphorylated ERK1/2 was performed using PathScan® Phospho-p44/42 MAPK (Thr202/Tyr204) Sandwich ELISA Kit (Cell Signaling Technology #7177).

[1438] The results are presented in FIG. 7A for STAT5 phosphorylation, in FIG. 7B for AKT phosphorylation, and in FIG. 7C for ERK1/2 phosphorylation.

[1439] The structures of the IL-2Rβγc ligands evaluated in FIGS. 7A-7C are provided in FIGS. 19A-19C.

### Example 9

### Proliferation of NK-92 with IL-2 and an IL-2Rβγc Ligand

[1440] NK-92 cells were plated in starvation media (minus growth factors) and incubated with serial dilutions of IL-2Rβγc ligand (BGL21) or IL-2 at 37° C. for 48 h. The number of viable cells present in each well was quantified by measuring ATP levels, which is an indicator of metabolically active cells, using a CellTiter-Glo® Assay Kit (Promega #G7571). An equal volume of CellTiter-Glo@ reagent was added to each well and incubated at 25° C. for 10 min. Luminescence signals were measured using a Wallac Victor 1420 plate reader. Values (in relative light units (RLU)) were plotted as a function of the concentration of the test compounds.

[1441] The results are provided in FIG. 8A.

[1442] NK-92 cell proliferation in response to IL-2Rβγc ligand (BGL21) or IL-2 was also measured using Ki67 staining. The nuclear protein Ki67 is present during all active phases of the cell cycle but is absent in resting cells. NK-92 cells were resuspended in starvation medium and plated at 2×10⁵ cells/well in a 96-well plate. Three-fold serial dilution of the test compound was then added to the cells for 48 h.

[1443] Following the incubation period, cells were treated with Live/Dead® Fixable Aqua Dye (ThermoFisher #L34966) for 30 min to stain for viable cells. The cells were then washed with PBS and then fixed and permeabilized for 1 h at 25° C. with Foxp3 Transcription Factor Fix/Perm@ buffer (eBioscience #00-5523). Cells were washed and then stained with anti-Ki67 PE antibody. After a final wash the cells were analyzed by flow cytometry on an LSR II instrument (Becton Dickinson). Data analysis was performed using FlowJo software. The median fluorescence intensity of Ki67+ cells is plotted as a function of test compound concentration.

[1444] The results are provided in FIG. 8B.

[1445] The structure of IL-2Rβγc ligand (BGL21) is provided in FIGS. 19A-19C.

### Example 10

### STAT-5 Phosphorylation in Resting CD8+ T-cells, CD4+ T-cells and Treg Cells

[1446] The agonist activity of IL-2 and an IL-2Rβγc ligand (IL-2Rβγc ligand (BGL21)), in resting CD8+ T-cells, CD4+ T-cells, and Treg cells was evaluated using a STAT5 phosphorylation assay. Human peripheral blood mononuclear cells (PBMC) were isolated from buffy coats using Lymphoprep® (Stemcell Technologies #07811) density gradient centrifugation. The recovered PBMCs were resuspended in T-cell medium (CTS OpTmizer® medium+2 mM L-glutamine+Pen/Strep with no serum or IL-2) at 2×10⁶ cells/mL and incubated for 3 h at 37° C. PBMCs were then added to a 96-well deep well plate at 10⁶ cells/well. Three-fold serial dilutions of IL-2Rβγc ligand (BGL21) or IL-2 were added to the cells and incubated for 30 min at 37° C. The cells were then fixed in Fix/Perm® buffer (Transcription Factor Phospho Buffer Set, BD Biosciences #563239) for 50 min on ice, followed by permeabilization in Perm Buffer III for 20 min on ice. Cells were washed several times using Perm/Wash® buffer. Antibody conjugates used for cell surface and intracellular staining are shown in Table 10.

TABLE 10
Antibody conjugates used for cell surface and intracellular staining.

| Marker | Clone | Channel | Supplier | Cat. No. |
|---|---|---|---|---|
| CD127 | eBioRDR5 | FITC | Invitrogen | 11-1278-42 |
| pSTAT5 | 47 | PE | BD¹ | 612567 |
| CD25 | M-A251 | PE-CF594 | BD | 562403 |
| CD56 | CMSSB | PerCP-eFl710 | Invitrogen | 46-0567-42 |
| CD16 | eBioCB16 | | Invitrogen | 46-0168-42 |
| Foxp3 | 236A/E7 | AF647 | BD | 561184 |
| CD3 | UCHT1 | BV421 | BD | 562426 |
| CD8 | SK1 | BV510 | BD | 563919 |

¹BD Biosciences.

[1447] Antibody mixtures were added to the cells and incubated for 30 min on ice and protected from light. Cells were washed with Perm/Wash® buffer and resuspended in PBS+2% FBS. Each test sample was analyzed by flow cytometry on an LSR II instrument (Becton Dickinson). Data analysis was performed using FlowJo software. The percent of pSTAT5+ cells in each blood cell population was plotted as a function of the concentration of test compound.

[1448] The results are presented in FIGS. 9A-9C.

### Example 11

[1449] Proliferation in NK Cells from Human PBMCs

[1450] Human PBMCs were isolated from a buffy coat by density gradient centrifugation (Lymphoprep®, Stemcell Technologies #07811) and cultured overnight in T-cell medium (CTS OpTmizer®, ThermoFisher #A1048501) at 3×10⁶ cells/mL in a T75 flask. The following day, cells were resuspended in fresh medium and plated at 5×10⁵ cells/well in a 96-well cell culture plate. Three-fold serial dilutions of either IL-2 or an IL-2Rβγc ligand (BGL21) were added to the cells and incubated for 3 days at 37° C. After the treatment, cells were incubated in viability dye (Live/Dead® Fixable Aqua Cell Stain Kit, ThermoFisher #L34965) for 30 min at 37° C., after which surface antibody staining was then performed in PBS+2% FBS for 30 min on ice. Cells were fixed and permeabilized with Fixation/Permeabilization Buffer (eBioscience Foxp3/Transcription Staining Buffer Set, ThermoFisher #00-5523-00) for 30 min on ice. Intracellular (Ki-67) staining was performed in Permeabilization Buffer for 30 min on ice and the treated cells resuspended in PBS+2% FBS prior to FACS analysis. NK cells were identified as CD56+ and/or CD159a+ cells from CD3−and CD20− (non-T, non-B cell) populations.

[1451] Antibody conjugates used for cell surface and intracellular staining are shown in Table 11.

TABLE 11
Antibody conjugates used for cell surface and intracellular staining.

| Marker | CD3 | Ki-67 | CD56 | CD20 | CD45RA | CD8 | CD159a | Live/Dead |
|---|---|---|---|---|---|---|---|---|
| Fluor | FITC | PE | PerCP-eFluor710 | PE-Cy7 | APC | BV421 | BV650 | Aqua |
| Clone | UCHT1 | SolA15 | CMSSB | 2H7 | HI100 | SK1 | 131411 | — |
| Vendor | Invitrogen | Invitrogen | Invitrogen | BioLegend | BD | BioLegend | BD | Invitrogen |
| Cat. no. | CD0301 | 12-2698-82 | 46-0567-42 | 302312 | 550855 | 344748 | 747920 | L349650 |

[1452] The results are presented in FIGS. 10A and 10B.

### Example 12

### Upregulation of PD-LI in A549 Tumor Cells and Tumor Cell Lysis PD-L1 Upregulation

[1453] Human peripheral blood mononuclear cells (PBMC) were isolated from buffy coats by density gradient centrifugation. Human lung carcinoma A549 cells (ATCC CCL-185) were seeded overnight in 6-well plates at 10⁶ cells/well. The next day, freshly isolated PBMCs were added to the A549 cells at 10⁷ cells/well for a final effector-to-target ratio (E:T) of 10:1. Serial dilutions of IL-2Rβγc ligand (BGL21) or IL-2 were added to the wells and cells were incubated at 37° C. for 48 h. PBMCs were then aspirated from the wells and the adherent A549 cells were collected using 0.25% (w/v) Trypsin-0.53 mM EDTA solution. Cells were washed with PBS and stained with the antibody mixture shown in Table 12 to quantify the levels of PD-L1 expression on A549 cells and to exclude PBMCs from the analysis.

TABLE 12
Cell-staining antibody mixture.

| Marker | CD14 | PD-L1 | CD56 | CD20 | CD3 |
|---|---|---|---|---|---|
| Channel | FITC | PE | PerCP-eFl710 | PE-Cy7 | BV421 |

[1454] Samples were analyzed by flow cytometry on an LSR II instrument (Becton Dickinson). The percent of A549 cells staining positive for PD-L1 was plotted as a function of the concentration of the test compound.

[1455] The results are presented in FIG. 11A.

### Example 13

### PBMC Tumor Cell Lysis

[1456] Freshly isolated PBMCs (effector cells) were resuspended in T-cell medium (CTS OpTmizer medium+2 mM L-glutamine+Pen/Strep with no serum or hIL-2) and plated at 6×10⁵ cells/well in a 96-well cell culture plate. Human colon carcinoma cell lines LS180 (ATCC CL-187) and COLO 205 (ATCC CCL-222) (target cells) were added to the PBMCs at 3×10⁴ cells/well for a final E:T ratio of 20:1. Dilutions of an IL-2Rβγc ligand (BGL21) or IL-2 were then added to the wells and cells were incubated at 37° C. for 48 hours. Cell supernatants were collected by centrifugation and 50 μL from each well was transferred to a 96-well plate. Tumor cell lysis was quantified by measuring LDH release with the Promega CytoTox 96® Non-Radioactive Cytotoxicity Assay Kit (#G1780). An equal volume of CytoTox 96® reagent was added to each well and incubated at 25° C. for 30 min. Stop solution (50 μL) was then added to each well to terminate the reaction and the absorbance signal was measured at 490 nm in a Wallac Victor 1420 plate reader. The percent cytotoxicity was calculated by dividing the value obtained for each sample by the maximum value obtained from supernatants obtained from wells treated with lysis buffer.

[1457] The results are presented in FIGS. 11B and 11C.

### Example 14

### Recombinant Fusion Proteins Incorporating an IL-2Rβγc Ligand

[1458] Immunoglobulin Fusions: Multiple mammalian expression vectors were constructed to express IL-2Rβγc ligands linked to full-length human IgG, or to Fc-fragments consisting of the CH2 and CH3 domains of the heavy chain and hinge regions of human IgG1, IgG2, or IgG4. Each vector contained a strong constitutive promoter (CMV or hEF1-HTLV) and an IL-2 signal peptide sequence for secretion of the fusion protein into the culture media. Vectors were designed to enable peptide ligands to be fused to either the N- or C-terminus of the immunoglobulin proteins and to incorporate construct linkers of varying lengths between the IL-2Rβγc ligands and IgG.

[1459] Fusion proteins were transiently expressed in 293 human embryonic kidney cells (FreeStyle® 293-F) by transfecting plasmid DNA into the cells using polyethyleneimine reagent PEI MAX (Polysciences, Inc.). Transfected cells were grown in FreeStyle® 293 Expression Medium (Thermo Fisher) in shaker flasks in a 37° C. humidified CO₂ incubator on an orbital shaker rotating at 125 rpm. Cultures were harvested 96 h post-transfection by centrifugation and the secreted fusion proteins were purified from the supernatants using protein A affinity chromatography.

[1460] Protein A agarose resin was mixed with culture supernatant and incubated at room temperature for several hours. The resin was then washed three times with PBS and bound IgG IL-2Rβγc ligand fusion was eluted with 0.1 M glycine buffer (pH 2.8). Eluates were neutralized with 1M Tris buffer and quantified by measuring absorbance at 280 nm using a NanoDrop® spectrophotometer. Protein concentrations were determined using calculated extinction coefficients derived from the primary sequence of the protein. Size exclusion chromatography was used to remove high molecular weight impurities prior to measuring the activities of the fusion proteins in bioassays.

[1461] Human Serum Albumin Fusion: A mammalian expression vector was constructed to express IL-2Rβγc ligands linked to the C-terminus of human serum albumin (HSA). A 6×-His tag (SEQ ID NO: 9431) was linked to the N-terminus of HSA for purification purposes. The vector contains a strong constitutive promoter (hEF1-HTLV) and an IL-2 signal peptide sequence for secretion of the fusion protein into the culture media.

[1462] HSA-IL-2Rβγc ligand fusion protein was transiently expressed in 293 human embryonic kidney cells (FreeStyle® 293-F) by first transfecting plasmid DNA into the cells using polyethyleneimine reagent PEI MAX (Polysciences, Inc.). Transfected cells were grown in FreeStyle® 293 Expression Medium (Thermo Fisher) in shaker flasks in a 37° C. humidified CO₂ incubator on an orbital shaker rotating at 125 rpm. Cultures were harvested 96 h post-transfection by centrifugation and the secreted HSA-IL-2Rβγc ligand fusion protein was purified from the supernatant by Ni-NTA affinity chromatography.

[1463] Ni-NTA agarose resin was added to the culture supernatant and incubated at room temperature for several hours. The resin was then washed three times with TBS wash buffer (25 mM Tris pH 8.0, 150 mM NaCl, 20 mM imidazole). Bound HSA-IL-2Rβγc ligand fusion protein was eluted from the resin with elution buffer (25 mM Tris pH 8.0, 150 mM NaCl, 250 mM imidazole) followed by buffer exchange to remove imidazole using Zeba® spin columns (Thermo Fisher). Protein was quantified by measuring absorbance at 280 nm using a NanoDrop® spectrophotometer and concentration was determined using calculated extinction coefficients derived from the primary sequence of the protein.

[1464] The amino acid sequences of the IL-2Rβγc ligand fusion proteins used in the experimental examples is provided in FIGS. 20A-20J and 21A-21C.

[1465] The hIgG2 Fc-fragment refers to the Fc region consisting of the CH2 and CH3 domains of the IgG2 heavy chain and the hinge region. The first and second cysteines of the hinge region were replaced with seine to prevent detrimental disulfide bridges. The last amino acid (lysine) of the Fc region was replaced with an alanine for fusion stability. The N-terminus of IgG2 Fc constructs starts with Ala-Pro-Leu (derived from InvivoGen vector).

[1466] The hIgG1v Fc-fragment refers to the Fc region consisting of the CH2 and CH3 domains of the IgG1 heavy chain and the hinge region. The first cysteine of the hinge region was replaced with a serine to prevent detrimental disulfide bridges. The last amino acid (lysine) of the Fc region was replaced with an alanine for fusion stability. Effector silencing mutations P329G, L234A/L235A(LALA) were included in the IgG1v Fc-(BGL21) construct (FP2) (SEQ ID NO: 1213). The N-terminus of the IgG1v Fc construct starts with Ala (derived from InvivoGen vector).

[1467] The hIgG4 Fc-fragment refers to the Fc region consisting of the CH2 and CH3 domains of the IgG4 heavy chain and the hinge region. Effector silencing mutations P329G, S228P/L235E (SPLE) were included in the hIgG4 Fc variant (FP3) (SEQ ID NO: 1214).

[1468] Fc-Knob refers to the Human Hinge Knob Fc IgG1 LALA-dK (decreased effector function and low C-terminal heterogeneity) (L252A, L253A, T384W).

[1469] Fc-Hole refers to the Human Hinge Hole Fc IgG1 LALA-dK (decreased effector function and low C-terminal heterogeneity) (L252A, L253A, T384S, L386A, Y425V).

[1470] The hIgG1 Fc-fragment refers to the Fc region consisting of the CH2 and CH3 domains of the IgG1 heavy chain and the hinge region. The last amino acid (lysine) of the Fc region was replaced with alanine for fusion stability. The construct includes effector silencing mutation N297A.

[1471] The hIgG2 Fc-fragment refers to the Fc region consisting of the CH2 and CH3 domains of the IgG2 heavy chain and the hinge region. The first and second cysteines of the hinge were replaced with sennes to prevent detrimental disulfide bridges. The last amino acid (lysine) of the Fc region was replaced with alanine for fusion stability.

[1472] Amino acid sequences of IL-2Rβγc ligand fusion proteins used in the experimental examples are provided in FIGS. 20A-20J.

### Example 15

### STAT5 Phosphorylation in TF-1b Cells with IL-2Rβγc Ligand Fusion Proteins

[1473] IL-2Rβγc ligand (BGL21) was fused to an IgG Fc-fragment consisting of the CH2 and CH3 domains of the heavy chain and hinge regions of human IgG2 (C-terminal fusion SEQ ID NO: 1212; N-terminal fusion SEQ ID NO: 1215) as described in Example 14. IL-2Rβγc ligand (BGL21) was also fused to a heterodimeric Fc-fragment (Knob-into-holes) variant consisting of the CH2 and CH3 domains of the heavy chain and hinge regions of human IgG1. IL-2Rβγc ligand (BGL21) was fused to the C-terminus of the knob-Fc-fragment (SEQ ID NO: 1216) which contains a “knob” mutation (T366W) and effector silencing mutations (L234A/L235A). The construct was co-expressed with a hole-Fc-fragment (SEQ ID NO: 1217), which contains “hole” mutations (T366S, L368A, Y407V) and effector silencing mutations (L234A/L235A), to produce a heterodimeric Fc-fragment with a single copy of IL-2Rβγc ligand (BGL21) at the C-terminus of the fusion protein. In addition to fusions to Fc-fragments, IL-2Rβγc ligand (BGL21) was also fused to the C-terminus of human serum albumin (SEQ ID NO: 1252) as described in Example 14.

[1474] Fusion proteins were incubated with TF-1β cells and STAT5 phosphorylation was measured as a function of concentration using the methods described in Example 3.

[1475] The structure of the IL-2Rβγc ligand fusion proteins is provided in FIGS. 20A-20J and 21A-21C.

[1476] The results are presented in FIG. 12.

### Example 16

### STAT5 Phosphorylation in TF-1β Cells with Different IL-2Rβγc Ligand IgG2 Fc-Fragment Fusion Proteins

[1477] A series of IL-2Rβγc ligands were fused to the C-terminus of an IgG2 Fc-fragment consisting of the CH2 and CH3 domains of the heavy chain and hinge regions of human IgG2 as described in Example 14. The IL-2Rβγc ligands included IL-2Rβ and IL-2Rγc ligands exhibiting various binding affinities to IL-2R that were linked together with a flexible linker (GGGGS)₂ (SEQ ID NO: 9396) between the two peptide sequences.

[1478] Fusion proteins were incubated with TF-1β cells and STAT5 phosphorylation was measured as a function of concentration using the methods described in Example 3.

[1479] The structures of the Fc-IL-2Rβγc ligand fusion proteins evaluated is provided in FIGS. 20 and 23 as SEQ ID NOS: 1212, 1239, 1243, 1244, 1250, and 1251.

[1480] The results are presented in FIG. 13.

### Example 17

### STAT5 Phosphorylation in NK-92 Cells with Fusion Proteins Including an IL-2Rγc Ligand Bound to the Fc-Fragment of Different IgG Isotypes

[1481] IL-2Rβγc ligand (BGL21) was fused to Fc-fragments consisting of the CH2 and CH3 domains of the heavy chain and hinge regions of three different isotypes of human IgG. In the first construct (FP2; SEQ ID NO: 1213) IL-2Rβγc ligand (BGL21) was fused to the C-terminus of a human IgG1 Fc-fragment variant in which the first cysteine in the hinge region was replaced by a serine to prevent detrimental disulfide bridges and the last amino acid (lysine) was replaced by alanine for fusion stability. Effector silencing mutations were also included in this variant (P329G, L234A/L235A). The second construct (FP1; SEQ ID NO: 1212) IL-2Rβγc ligand (BGL21) was fused to the C-terminus of a human IgG2 Fc-fragment variant in which the first and second cysteines in the hinge region were replaced by serine to prevent detrimental disulfide bridges and the last amino acid (lysine) was replaced by alanine for fusion stability. In a third construct (FP3; SEQ ID NO: 1214) IL-2Rβγc ligand (BGL21) was fused to the C-terminus of a human IgG4 Fc-fragment variant that contained effector silencing mutations (P329G, S228P/L235). Each fusion protein was expressed and purified as described in Example 14.

[1482] Fusion proteins were incubated with TF-13 cells and STAT5 phosphorylation was measured as a function of concentration using the methods described in Example 3.

[1483] The structure of the IgG Fc-IL-2Rβγc ligand fusion proteins (FP1)-(FP3) is provided in FIGS. 20A and 21A-21C and corresponds to SEQ ID NOS: 1212, 1213, and 1214.

[1484] The results are presented in FIG. 14.

### Example 18

### STAT5 Phosphorylation in TF-1b Cells with IL-2Rβγc Ligand IgG2 Fc-Fragment Fusion Proteins Having Different Fc Linkers

[1485] IL-2Rβγc ligand (BGL21) IgG2 Fc-fragment variants containing a series of flexible construct linkers with glycine or glycine/serine repeats, or rigid construct linkers with proline/alanine repeats between the Fc-fragment and the C-terminal IL-2Rβγc ligand (BGL21) were prepared as described in Example 14.

[1486] Fusion proteins were incubated with TF-13 cells and STAT5 phosphorylation was measured as a function of concentration using the methods described in Example 3.

[1487] The structure of the Fc-IL-2Rβγc ligand fusion proteins is provided in FIGS. 20A-20J and 21A-21C and correspond to IL-2Rβγc ligand fusion proteins (FP16)-(FP24) corresponding to SEQ ID NOS: 1227-1235.

[1488] The results are presented in FIG. 15.

### Example 19

### STAT5 Phosphorylation in TF-1b Cells and NK-92 with IL-2Rβγc Ligand IgG2 Fc-Fragment Fusion Proteins Having Different Fc Linkers

[1489] IL-2Rβγc ligand (BGL21) IgG2 Fc-fragment variants that contained a flexible linker consisting of a (GS)₁₀ (SEQ ID NO: 9407) (see FP14; SEQ ID NO: 1225) flexible linker or a rigid linker consisting of (PA)₁₀ (SEQ ID NO: 9428) (see FP15; SEQ ID NO: 1226) between the IgG2 Fc-fragment and the C-terminus of IL-2Rβγc ligand (BGL21) were prepared as described in Example 14.

[1490] The fusion proteins were incubated with TF-1□ cells and STAT5 phosphorylation was measured as a function of concentration using the methods described in Example 3. Each fusion protein was also tested in a NK-92 cell proliferation assay using Ki67 staining to quantify cells that proliferated in response to the compounds as described in Example 9.

[1491] The structures of the Fc-IL-2Rβγc ligand fusion proteins are provided in FIGS. 20A-20J and 21A-21C. In FIGS. 21A-21C the amino acid sequence of the parent IL-2Rβ ligand and parent IL-2Rγc ligand are referenced. Each of the IL-2Rβ ligands and each of the IL-2Rγc ligands used in the Fc-IL-2Rγc fusion proteins includes two flanking glycines on each of the N-terminus and the C-terminus of the parent ligand. For example, IL-2Rβγc ligand fusion protein (FP1) having SEQ ID NO: 1212, includes IL-2RD ligand having SEQ ID NO: 914, which corresponds to parent IL-2Rβ ligand having SEQ ID NO: 865 (BL4) with glycines on each of the N-terminus and C-terminus, bound to IL-2Rγc ligand having SEQ ID NO: 1052, which corresponds to parent IL-2Rγc ligand having SEQ ID NO: 965 (GL2) with two glycines on each of the N-terminus and C-terminus.

[1492] The results are presented in FIGS. 16A and 16B.

### Example 20

### PD-1 Binding and IL-2 Agonist Activity of Anti-PD-1 Antibody-IL-2Rβγc Ligand (BGL21) Fusion Proteins

[1493] IL-2Rβγc ligand (BGL21) was fused to the C-terminus of the heavy chains of two therapeutic checkpoint inhibitor antibodies that target PD-1 (Pembrolizumab (FP8) (SEQ ID NO: 1219; Cemiplimab (FP10) (SEQ ID NO: 1221) as described for heterodimeric peptide fusions to IgG Fc-fragments in Example 14. The constructs were transiently co-expressed with their corresponding light chain constructs (Pembrolizumab (FP7; SEQ ID NO: 1218); Cemiplimab (FP9; SEQ ID NO: 1220) in HEK-293F cells to produce full IgG IL-2Rβγc ligand (BGL21) fusions.

[1494] Purified proteins were evaluated for binding to PD-1 target protein by ELISA. Recombinant human PD-1 his tagged protein (R&D Systems 8986-PD-100) was dissolved in PBS at 1 μg/mL and directly immobilized in microtiter wells by absorption followed by blocking with PBS/1% BSA. Serial dilutions of Pembrolizumab and Cemiplimab antibodies or the corresponding IL-2Rβγc ligand (BGL21) fusion proteins were added to the wells and incubated for 1 h at 4° C. Wells were then washed with PBS and an anti-human IgG HRP-linked antibody was added to each well and incubated for 1 hour at 4° C. After a final wash TMB substrate solution was added to measure the amount of HRP in each well. Absorbance at 450 nm was read in a microplate reader. The signal that is produced is proportional to the quantity of antibody bound to PD-1 in each well. The result of the binding to PD-1 is shown in FIGS. 17A and 17C.

[1495] Pembrolizumab and Cemiplimab IL-2Rβγc ligand (BGL21) fusion proteins were incubated with TF-1P cells and STAT5 phosphorylation was measured as a function of concentration using the methods described in Example 3. The results of the STAT5 phosphorylation assay are shown in in FIGS. 17B and 17D, respectively.

[1496] The structure of the Fc-IL-2Rβγc ligand fusion proteins is provided in FIGS. 20A-20J and 21A-21C.

### Example 21

### Synthesis of PEGylated IL-2Rγc Ligand (BGL21) Construct

[1497] An analog of IL-2Rβγc ligand (BGL21) was prepared as described in Example 1 except instead of acetylating the N-terminal primary amine with acetic anhydride, Fmoc-PEG₁₀-CH2CH2-CO₂H (Anaspec, Hayward, CA) was added to the N-terminus using a final HATU-mediated coupling step, and the Fmoc-protecting group was removed as described previously. Cleavage from the resin and disulfide formation were performed as described in Example 1 to provide the oxidized peptide with a free N-terminal primary amine. The IL-2Rβγc ligand (BGL21) (1.5 molar equivalents) was mixed with the NHS-ester of a 40 kD branched PEG reagent (1.0 molar equivalent) (NOF Corp., Tokyo, Japan) in dry DMF. After gentle stirring for 15 min at 25° C., DIEA (10 molar equivalents) was added, and the reaction allowed to proceed to completion (approx. 4 h; analysis by analytical C18 reverse phase HPLC). The final product (PEG-8) was purified by C18 reverse phase HPLC, and the structure of the PEGylated peptide was confirmed by MALDI ToF (time of flight) mass spectrometry and reverse phase HPLC.

### Example 22

### Agonist Activity of PEG-IL-2Rβγc Ligand

[1498] The PEG-IL-2Rβγc ligand construct synthesized in Example 21 (PEG-8) was incubated with NK-92 cells and STAT5 phosphorylation was measured as a function of concentration using the methods described in Examples 3 and 4.

[1499] The results are presented in FIG. 18.

### Example 23

### Production Method

[1500] A mammalian cell expression construct was prepared in which the IL-2Rβγc ligand (BGL21) was fused to the C-terminus of a human IgG1 Fc-fragment variant (FP13; SEQ ID NO: 1224). The first cysteine in the hinge region was replaced by a serine to prevent detrimental disulfide bridges and the last amino acid (lysine) was replaced by alanine for fusion stability. An effector silencing mutation was also included in this variant (N297A). A flexible linker (GS)₁₀ (SEQ ID NO: 9407) is located between the Fc-fragment and the IL-2Rβγc ligand (BGL21).

[1501] Additional mammalian cell expression constructs were prepared in which the IL-2Rβγc ligand (BGL21) was fused to the C-terminus of a human IgG2 Fc-fragment variant in which the first and second cysteines in the hinge region were replaced by serine to prevent detrimental disulfide bridges and the last amino acid (lysine) was replaced by glycine for fusion stability. A flexible linker (GS)₁₀ (SEQ ID NO: 0407) (see FP14; SEQ ID NO: 1225) or a rigid linker (PA)₁₀ (SEQ ID NO: 9428) (see FP15; SEQ ID NO: 1226) is located between the Fc-fragment and the IL-2Rβγc ligand (BGL21).

[1502] Expression plasmids were transfected into CHO-K1 cells and stable pools expressing IL-2Rβγc ligand (BGL21) IgG Fc-fragment fusions were selected in antibiotic containing media. Individual clones were isolated from these pools by limiting dilution and tested for high expression of the IL-2Rβγc ligand (BGL21) IgG Fc-fragment fusion proteins. Large scale cultures of high expressing clones were harvested by centrifugation and the secreted fusion proteins were purified from the supernatants using protein A affinity chromatography. Size exclusion chromatography was used to remove high molecular weight impurities.

### Example 24

### pH Selective Screening

[1503] IL-2Rβ and IL-2Rγc ligands were screened with two peptide libraries to identify peptides exhibiting pH-dependent affinity for the respective receptor subunit. The screening approach utilized cycles of binding and elution under various acidic and neutral pH conditions.

[1504] The binding of phage to IL-2Rβ-GPI or IL-2Rγc-GPI was determined using phage ELISA at the two target pH values and the percent change in binding at pH 7.4 relative to binding at pH 6.0 was calculated.

[1505] For pH-dependent phage titration, the ELISA screening protocol described in the preceding paragraph was used with the following differences: (1) all 96-well ELISA plates contained IL-2Rβ-GPI target; or IL-2Rγc-GPI target, and (2) the titration of the phage supernatants was prepared in two different PBT pH buffers; pH 6.0 and pH 7.4.

[1506] Phage titration was performed in a 96-well polypropylene plate using the following procedure. A 3-times dilution of phage in PBT pH 6 buffer and pH 7.4 buffer was prepared. One hundred (100) pL of the diluted phage were transferred to the target-coated assay plate and incubated at 4° C. for 1 h.

[1507] The pH 6.0 wells were washed 3 times with cold PT pH 6.0 and the pH 7.4 wells were washed 2 times with cold PT pH 7.4.

[1508] The bound phage were detected with anti-M13-HRP.

### Example 25

### ELISA Protocol for Biotinylated Peptide pH-Dependent Binding (IL-2R/Fc-Receptor Binding/Multivalent)

[1509] For each peptide to be assayed, sixteen (16) ELISA plate wells were coated with neutravidin (10 pg/mL in PBS pH 7.2) at 50 μL/well. The coated wells were incubated at 25° C. for at least 1 h.

[1510] The neutravidin was removed from each well. Three hundred (300) μL of blocking buffer (1×PBS pH 7.2, 1% BSA) was added to each well of the neutravidin-coated plates. All plates were covered and maintained at 25° C. for 1 h or overnight at 4° C.

[1511] The incubated plates were washed 4 times with PT (1×PBS pH 7.2, 0.05% Tween®20) buffer.

[1512] The biotinylated peptides were diluted to 1 μM in PBT pH 7.2 buffer and 50 μL was added to the appropriate 16 wells (8 for each binding pH). The plates were incubated at 25° C. for at least 1 h.

[1513] Two (2) titrations of IL-2Rβ-Fc protein were prepared in a polypropylene plate starting at 2 pg/mL using PBT pH 6.0 and pH 7.4 and diluting 3-fold.

[1514] The plates were washed 4-times with PT (1×PBS pH 7.2, 0.05% Tween®20) buffer.

[1515] Fifty (50) μL of the IL-2Rβ-Fc protein dilutions were added to the assay plates buffered at pH 6.0 or pH 7.4) and incubated for 1 h at 4° C.

[1516] The incubated plates were washed 3-times with the corresponding pH buffer PT (50 mM PBS pH 6.0, 0.05% Tween®20 or 50 mM PBS pH 7.4, 0.05% Tween®20).

[1517] Fifty (50) μL of goat anti-huIgG-HRP diluted 1:2500 in cold PBT pH 6.0 was added to each well.

[1518] The plates were then incubated for 1 h at 4° C. The plates were then washed 4 times with cold buffer PT pH 6.0. Fifty (50) μL of TMB was then added to each well, and the wells were incubated for 1-10 min at 25° C. Fifty (50) μL of a “stop” solution was added to each well, and the plates were read at 450 nm.

### Example 26

### STAT5 Phosphorylation in NK-92 Cells with IL-2Rγc Ligands Having a pH-Biased IL-2Rβ Ligand

[1519] The IL-2R agonist activity of a pH-biased IL-2Rβγc ligand comprising an IL-2Rβ ligand with a pH-biased affinity for IL-2Rβ was evaluated using a STAT5 phosphorylation assay in NK-92 cells.

[1520] The IL-2Rβγc ligand was incubated with NK-92 cells and STAT5 phosphorylation measured as a function of concentration using the methods described in Example 4 where the starvation media was adjusted to either pH 6.0 or pH 7.4.

[1521] The results are presented in FIG. 24.

### Example 27

### Competition ELISA Protocol for IL-2Rb Ligand pH-Biased Binding

[1522] For each peptide to be assayed, sixteen (16) ELISA plate wells were coated with IL-2Rβ-Fc (50 ng/well) for at least 1 h at 25° C. or overnight at 4° C.

[1523] The IL-2Rβ-Fc was removed from each well. Three hundred (300) μL of blocking buffer (1×PBS pH 7.2, 1% BSA) was added to each well of the IL-2Rβ-Fc-coated plates. All plates were covered and maintained at 25° C. for at least 1 h.

[1524] The incubated plates were washed 3-times with PT (1×PBS pH 7.2, 0.05% Tween®20) buffer.

[1525] A pH-biased IL-2Rβγc ligand having a pH-biased IL-2Rβ ligand was diluted to 2-times final concentration (20 μM) in PBT pH 6.0 and pH 7.2 buffer and 50 μL was added to the appropriate 16 wells (8 for each binding pH). The plates were then incubated at 4° C. for 1 h.

[1526] A biotinylated version of a peptide ligand that is competitive with the test peptide an in which the binding affinity is the same at pH 6.0 and 7.4, was combined with a neutravidin-HRP conjugate for at least 45 min to prepare the peptide-HRP complex, which was then diluted in pH 6.0 or pH 7.4 PBT.

[1527] Without washing, fifty (50) μL of the peptide-HRP complex dilutions were added to the assay plates buffered at pH 6.0 or pH 7.4 and incubated for 1 h at 4° C.

[1528] The incubated plates were washed 3-times with the corresponding pH buffer PT (50 mM PBS pH 6.0, 0.05% Tween®20 or 50 mM PBS pH 7.4, 0.05% Tween®20).

[1529] Fifty (50) μL of TMB (3,3′5,5′-tetramethylbensidine) was then added to each well, and the wells were incubated for from 1 to 15 min at 25° C. Fifty (50) μL of a stop solution was added to each well, and the plates were read at 450 nm. The results are presented in FIG. 25.

### Example 28

### Competitive Binding

[1530] Competitive binding assays were performed to characterize the IL-2R binding site for IL-2Rβ ligands, to IL-2Rγc ligands, and to IL-2Rβγc ligands.

[1531] For IL-2Rβ ligands, representative phage clones displaying peptides from IL-2Rβ ligand families were bound to the extracellular domain (ECD) of the IL-2Rβ subunit immobilized in microtiter wells. Phage binding was conducted in the presence and absence of synthetic test peptides to determine if phage peptides and test peptides competed for binding to the same sites on IL-2Rβ. Synthetic test peptides were selected to represent peptides from IL-2Rβ ligand families, as well as positive and negative control peptides. IL-2Rβ ligand family sequences and the specific IL-2Rβ ligands evaluated are provided in Table 13.

TABLE 13
IL-2Rβ ligand families and ligands.

| IL-2Rβ | Specific IL-2Rβ | | | | | | | | | | | | | | |
|---|---|---|---|---|---|---|---|---|---|---|---|---|---|---|---|
| Ligand Family | SEQ ID NO: | Peptide Sequence | | | | | | | | | | | | | |
| 1 | 58 | Y | D | C | R | I | A | Q | V | G | E | L | C | D | L |
| 2A | 169 | N | M | C | L | V | G | D | Y | W | P | S | C | Q | I |
| 2A | 170 | Q | I | C | D | V | G | Q | W | W | P | D | C | Q | V |
| 2B | 83 | C | C | Y | Q | A | M | V | G | D | L | C | D | F | C |
| 2C | 1034 | C | G | M | A | I | G | D | L | C | M | W | T | | |
| 2C | 1042 | R | W | G | D | V | G | D | L | L | M | P | L | | |
| 4 | 1044 | R | S | C | Y | Y | K | R | P | R | L | W | C | S | E |
| IL-2Rγc Ligand | 224 | D | C | S | M | W | E | G | V | E | L | C | W | | |

[1532] The IL-2Rβ ligands bound to the IL-2Rβ subunit with an IC₅₀ of less than 10 μM and bound to the IL-2Rγc subunit with an IC₅₀ of greater than 100 μM.

[1533] Phage binding to the immobilized IL-2Rβ ECD was detected by staining with antibody against phage coat proteins (anti-phage Ab), staining with labeled secondary antibody against the anti-phage Ab, and scored by reading OD in the microtiter plate optical reader.

[1534] The ELISA signal for each phage binding in the presence and absence of the test peptides was compared to determine which synthetic peptides competed with which phage peptides for binding to the IL-2Rβ subunit. The peptide pairs that exhibited competitive binding (i.e., cross inhibition) were considered to bind at the same functional site on the IL-2 receptor. The results are presented in Table 14.

TABLE 14
Binding of IL-2Rβ ligands to IL-2R.

| | IL-2Rβ Ligand | Phage Clone | | | | |
|---|---|---|---|---|---|---|
| IL-2Rβ Ligand | SEQ ID NO: | 58 | 170 | 83 | 1034 | 1044 |
| SEQ ID NO: | IL-2β Family | 1 | 2A | 2B | 2C | 4 |
| 58 | 1 | +¹ | + | + | + | − |
| 169 | 2A | + | + | + | + | − |
| 1042 | 2C | + | + | + | + | − |
| 1044 | 4 | −² | − | − | − | + |
| 224 | 11-2Rγc Ligand | − | − | − | − | − |

¹IL-2Rβ ligand competes with phage binding.
²IL-2Rβ ligand does not compete with phage binding.

[1535] The IL-2Rβ ligands did not bind competitively to the binding site of the IL-2Rβ subunit with IL-2.

[1536] A similar study was performed to evaluate the binding of IL-2Rγc ligands. IL-2Rγc ligand family sequences and the specific IL-2Rγc ligands evaluated are provided in Table 15.

TABLE 15
IL-2Rγc ligand families and ligands.

| IL-Rγc | Scpecific IL-2Rγc | | | | | | | | | | | | | | | |
|---|---|---|---|---|---|---|---|---|---|---|---|---|---|---|---|---|
| Ligand Family | SEQ ID NO: | Peptide Sequence | | | | | | | | | | | | | | |
| 1A | 198 | K | V | C | E | M | W | G | G | V | L | L | C | W | N | |
| 1A | 202 | R | T | C | T | E | W | E | N | V | V | L | C | W | V | |
| 1B | 224 | D | C | S | M | W | E | G | V | E | L | C | W | | | |
| 2 | 236 | M | C | W | L | E | W | G | E | W | V | G | S | C | L | |
| 3 | 248 | D | L | S | D | L | S | T | F | W | L | S | Q | | | |
| 4 | 266 | C | P | S | M | L | Q | G | P | E | T | Y | W | V | C | |
| 5 | 1032 | S | L | L | K | C | Y | N | A | S | Y | C | S | S | V | F |
| IL-2Rβ Ligand | 58 | Y | D | C | R | I | A | Q | V | G | E | L | C | D | L | |

[1537] The IL-2Rγc ligands bound to the IL-2Rγc subunit with an IC₅₀ of less than 10 μM and bound to the IL-2Rβ subunit with an IC₅₀ of greater than 100 μM.

[1538] The results of the competitive binding assay are presented in Table 16.

TABLE 16
Binding of IL-2Rγc ligands to IL-2R.

| IL-2Rγc | IL-2Rγc Ligand | Phage Clone | | | | | |
|---|---|---|---|---|---|---|---|
| Ligand | SEQ ID NO: | 198 | 224 | 236 | 248 | 266 | 1032 |
| SEQ ID NO: | IL-2Rγc Family | 1A | 1B | 2 | 3 | 4 | 5 |
| 202 | 1A | +¹ | + | + | + | + | − |
| 224 | 1B | + | + | + | + | + | − |
| 236 | 2 | + | + | + | + | + | − |
| 248 | 3 | + | + | + | + | + | − |
| 1032 | 5 | −² | − | − | − | − | + |
| 58 | IL-2Rβ Ligand | − | − | − | − | − | − |

¹IL-Rγc ligand competes with phage binding.
²IL-Rγc ligand does not compete with phage binding.

### Example 29

### Agonist Activity of PEG-IL-2Rβγc Ligand Constructs

[1539] PEG-IL-2Rβγc ligand constructs were synthesized as described in Example 21. The structures of the PEG-IL-2Rβγc ligand constructs is shown in FIGS. 27-33. The IL-2Rβγc ligand used for each of the constructs had SEQ ID NO: 1263. The PEG constructs were incubated with NK-92 cells and STAT5 phosphorylation was measured as a function of concentration using the methods described in Examples 3 and 4, respectively.

[1540] The results are presented in Table 17.

TABLE 17
Agonist activity of PEG-IL-2Rβγc ligand constructs.

| | PEG | | | | | | | | EC50 | |
|---|---|---|---|---|---|---|---|---|---|---|
| | attachment | PEG | PEG/peptide | PEG | IL-2Rβ | | IL-2Rγc | | (STAT5, | |
| Construct | terminus | size | linker | structure | IC50 | | IC50 | | NK92) | |
| PEG-1 | N— | 40 kD | ¹PEG10 | branched | 31 | nM | 26 | nM | 5.8 | nM |
| PEG-2 | C— | 40 kD | ¹PEG4 | branched | 8 | nM | 690 | nM | 273 | nM |
| PEG-3 | N— | 40 kD | (AP)6 | branched | 14 | nM | 4.3 | nM | 2.3 | nM |
| | | | (SEQ ID | | | | | | | |
| | | | NO: 9432) | | | | | | | |
| PEG-4 | C— | 40 kD | ¹PEG10 | branched | 8.5 | nM | 3.7 | nM | 24 | nM |
| PEG-5 | N— | 20 kD | ¹PEG20 | linear | 33 | nM | 4.1 | nM | 1.0 | nM |
| PEG-6 | N— | 40 kD | ¹PEG20 | linear | 17 | nM | 3.4 | nM | 1.6 | nM |
| PEG-7 | N— | 40 kD | ¹PEG20 | branched | 3.4 | nM | 1.7 | nM | 8.3 | nM |

¹Incorporated as Fmoc-NH—(PEGₙ)—CH₂CH₂—COOH, where n = 4, 10, or 20.

### Example 30

### IL-2Rβγc PEG-Peptide Agonist PK Analysis in CD-1 Mice

[1541] A pharmacokinetic study of an IL-2Rβγc PEG-peptide agonist was performed in CD-1 male mice. An IL-2Rβγc PEG-peptide agonist (PEG-6) was administered intravenously with a single dose of 1 mg/kg to each mouse (n=5). Blood samples were collected at 0 h (pre-dose), 1, 2, 6, 24, 48, 72 and 96 h post-dosing into serum separator vials. Samples were centrifuged at 10,000×g for 5 min at 4° C. and the serum transferred to a new tube. Samples were frozen and stored at −80° C. prior to testing.

[1542] The TF-Iβ STAT5 phosphorylation bioassay as described in Example 3 was used to quantify the amount of PEG-6 present in each of the serum samples. Three-fold serial dilutions of each serum sample or a compound reference standard in starvation media were added to the cells and incubated for 30 mins with the cells. Cells extracts were prepared and the quantity of phosphorylated STAT5 was determined as described in Example 3. The PEG-6 concentration in each serum sample was calculated using a standard curve generated from the reference standard.

[1543] The results are presented in FIG. 26.

### Example 31

### Phage Display pIII Library Panning Against Fc-Receptor Fusions on Magnetic Beads (Acid Elution) Library Panning Procedure

[1544] The following protocol or similar protocol was used to screen peptides for binding to the hIL-2Rβ and the hIL-2Rγc subunits and for some peptides to the cyno-IL-2Rβ and the cyno-IL-2Rγc subunits.

[1545] Fifty (50) μL of Protein G Dynabeads® (Invitrogen) was used for each library sample. After resuspending the stock bottle, the desired volume of beads was transferred to a sterile microfuge tube and applied to the magnet.

[1546] With the beads on a magnet, the supernatant was removed, and the beads were washed with 1 mL of PT buffer (1×PBS, 0.05% Tween®20).

[1547] The supernatant was removed and 1 mL of PBS+1% BSA+0.05% Tween®20 was added and mixed at 25° C. for at least 1 hour to block the beads.

[1548] A tube was applied to the magnet and the blocking solution was removed. For each library to be tested, 5 μg of a Fc-fused receptor of interest was added to each library sample for each round to bring the total volume to at least 400 μL. The samples were mixed at 25° C. for at least 1 h. The sample was applied to the magnet and the supernatant was removed.

[1549] Two-hundred 200 μL of PT buffer was added for each 50 μL of bead. The sample was thoroughly mixed and 200 μL aliquots were transferred into tubes that were pre-labeled for each library to be screened. An additional 500 μL of PT was added to each tube, the samples mixed, and then applied to the magnet. A total of 700 μL/tube was used for the wash.

[1550] One (1) mL aliquots of the libraries removed from the −20° C. freezer. One hundred (100 μL of 10× BT buffer (5% BSA, 0.5% Tween®20 in 1×PBS) was added to each tube and vortexed. The library samples were transferred to pre-labeled tubes containing beads. The samples were then incubated at 4° C. on the rotator for at least 2 h. For the additional rounds of screening, 1 mL aliquots of the amplification from the previous round from each library was used. The beads were recovered with the magnet and the phage solution removed. The beads were washed 2× with 1 mL of PT buffer. Five hundred (500) μL of PT buffer was added and the suspension was transferred to a clean tube. The beads were recovered on the magnet and the final wash removed.

[1551] Four-hundred seventy-five (475) μL of phage elution buffer was added to each well (0.2 M glycine-HCL, pH 2.2, 1.0 mg/mL BSA). The samples were incubated at 25° C. for 10 min on the rotator. The beads were recovered on the magnet and the eluted phage transferred to a clean tube.

[1552] Twenty-five (25) μL of neutralization buffer (2 M Tris Base) was added to the 475 μL of elution.

[1553] The neutralized samples were maintained at 4° C. until the TG1 cells were ready amplification. The samples were stored at −20° C. after screening. Fifty (50) μL (about 10% of the total volume) was transferred to a 1.5 mL microfuge tube and store at −20° C. for use in deep sequencing.

### Example 32

### TG1 Culture and Library Amplification

[1554] A fresh TG1 (or OmniMax) culture was grown for about 1 to 1.5 h after adding the libraries to the beads. 2×-YT medium (10 mL) was placed into a 50 mL Falcon® tube. Two hundred (200) μL of the TG1 overnight was added to the falcon tube. 2×-YT medium (600 μL) was placed in a cuvette for OD600 blank. The culture was grown at 250 rpm and 37° C., taking the first OD measurement after 60 min. The TG1 cells should be in log phase at the time of use with an OD600 of 0.5-0.7.

[1555] Eluted phage (400 μL to 450 μL) was added to 1.0 mL of the TG1 cells at an OD600 of 0.5-0.7 in a 50 mL Falcon® tube. The phage and TG1 cells were incubated at 37° C. for 30 min without shaking. About 50 μL to 100 μL was set aside for titering and characterization.

[1556] 2YT medium (10.5 mL) was added to 12 μL of carbenicillin (carb) (100 mg/mL to make 100 μg/mL) and 24 μL of 50% glucose (to make 0.1% glucose) and the cells incubated while shaking at 37° C. at 250 rpm for 1 h.

[1557] M13K07 helper phage (5×10¹⁰ pfu, 24 μL of the stock, 2×10¹² pfu/mL) was then added and swirled to mix. The phage and cells were incubated at 37° C. for 30 min without shaking.

[1558] Kanamycin was diluted to 3 mg/mL and arabinose to 2.4% in 2YT medium/Carbenicillin-100/0.1% glucose and 100 μL was added to each amplification. The mixture was incubated overnight at 37° C. and 250 rpm.

[1559] The culture was transferred to a 50 mL high-speed VWR centrifuge tube and centrifuged at 8,000 g for 15 min at 4° C. in a JSP-F50C centrifuge to pellet the cells.

[1560] The supernatant was transferred to a 50 mL high-speed VWR centrifuge tube and 0.2 volumes of PEG/NaCl (multiply the volume by 0.25 mL to 3 mL PEG/NaCl for 12 mL amplification) was added, mixed, and incubated on ice for 30 minutes.

[1561] The cells were then centrifuge at 10,500 g for 15 min at 4° C. in a JSP-F50C centrifuge. The supernatant was removed, and the phage pellet was resuspended in a total of 1 mL of PBT (1×PBS, 0.05% Tween®20, 0.5% BSA) by pipetting.

[1562] The sample was transferred to an Eppendorf tube, vortexed, and centrifuged at 12,000 rpm for 30 sec. The supernatant was transferred to a clean Eppendorf tube and stored at 4° C. This amplified phage sample (250-500 μL) was used for the next round of screening.

### Example 33

### Preparation of Cultures from Individual Colonies

[1563] Ninety-six (96) wells of a deep well plate were filled with 1 mL of 2YT broth/Ampicillin-50/0.1% glucose. Ninety-six (96) colonies were placed into the wells using P20 tips. The tips were left in the wells to mark the position. The tips were removed using a multi-channel pipette after the entire plate was completed. The plate was covered with a breathable film.

[1564] The inoculated plate(s) were incubated in a shaker at 37° C. until the cultures became turbid, typically within 4 h at 250 rpm.

[1565] The plate(s) was removed from the incubator and 50 μL of the culture from each well was removed to another deep well block designated as the “Archive Block” containing 1 mL of 2YT broth/Ampicillin-50/0.1% glucose. The plate(s) were covered with a breathable film and incubated overnight at 37° C. and 250 rpm.

[1566] After incubating overnight, M13K07 helper phage was added to 2×10¹⁰ pfu/mL in 2YT broth/Ampicillin-50/0.1% glucose (make 6.0 mL per block). Fifty (50) μL of the diluted M13K07 was added to each culture well in the deep well block. The deep well block was covered with breathable film and incubated for 30 min at 37° C. and 250 rpm.

[1567] Kanamycin was diluted to 0.5 mg/mL and arabinose to 0.4% in 2YT broth/Ampicillin-50/0.1% glucose (make 6.0 mL per block) and 50 μL was added to each well. The plate was covered with a breathable film and incubated overnight at 37° C. and 250 rpm.

[1568] The “Archive Block” culture was removed from the incubator and 50 μL was transferred to a 96-well plate containing 50 μL of 50% glycerol. The plate was sealed with foil and stored at −80° C. The remaining culture in the block was covered with a foil seal and stored at 4° C.

[1569] The block was centrifuged and inoculated with M13K07 at 4000 rpm for 15 min. While avoiding the bacterial pellet, 850 μL of the phage supernatant was transferred to a fresh deep well plate, covered with a foil seal, and stored at 4° C.

### Example 34

### ELISA Protocol for Fc-fusions

[1570] For each block to be assayed, a 1×⁹⁶ well ELISA plate was coated with Fc-fusion (1 μg/mL in PBS) at 50 μL/well. The wells were incubated at 25° C. for at least 1 h.

[1571] The Fc-fusion was removed from each well. Three hundred (300) μL of blocking buffer (1×PBS, 1% BSA) was added to each well of a receptor-coated plate. Also, 300 μL of the blocking buffer was added to a separate uncoated 96-well ELISA plate to be used as the negative control. Both plates were covered with film and left at 37° C. for 1 h or overnight at 4° C.

[1572] The plate was washed 4 times with PT (1×PBS, 0.05% Tween® 20) buffer. Fifty (50) μL of PBT was added to each well. Fifty (50) μL of the phage supernatant from the block was added to each well and incubated at 4° C. for 1 h. The plates were washed 4 times with cold PT. To each well 100 μL of anti-M13-HRP antibody diluted 1:5000 in cold PBT was added. The wells were incubated for 1 h at 4° C.

[1573] The plates were then washed 4 times with cold PT. Fifty (50) μL of TMB was then added to each well, and the wells were incubated for 1-10 min at 25° C. Fifty (50) μL of a “stop” solution was added and the plate read at 450 nm.

### Example 35

### Evaluation of Peptide Heterodimer Ability to Dimerize IL-2Rγc and to Activate IL-2 Responsive Cells

[1574] Following the identification of peptidyl ligands that exhibit IL-2Rβ and IL-2Rγc binding activity, compounds will be identified that exhibit IL-2R agonist activity. This will involve assessing the ability of the peptide to dimerize the IL-2Rβγc subunits and to signal in cell-based assays. Dimerization is a necessary, but not sufficient, step in the activation of receptor signaling. To assess agonist activity in cell-based assays, IL-2 responsive cell lines will be tested for an indicator of IL-2 signaling, phosphorylation of STAT5. Compounds that exhibit IL-2Rβγc agonist activity in these cell lines will then be tested in primary human peripheral blood mononuclear cells (PBMC) for IL-2R agonism, and for the desired selectivity favoring activation of cell types expressing IL-2Rβγc subunits, but with low or no IL-2Rα (CD25) subunit expression.

[1575] Dimerization potential will be assessed using a β-Gal complementation system in which a portion of the intracellular domains of each respective IL-2 receptor subunit is replaced with functionally complementary fragments of -Gal, which regain catalytic activity when brought into sufficiently proximity. Cells expressing these constructs generate R-Gal activity, with an ED50 of about 26 nM, when treated with IL-2 (see DiscoverX product specifications). All synthetic, potentially agonist, peptides will be tested using this assay.

[1576] Candidate compounds will be scored for induction of STAT5 phosphorylation in two cell lines: (1) CTLL-2 cells, a mouse cytotoxic T-lymphocyte line that expresses all three IL-2 receptor subunits, and which are responsive to IL-2Rβγc-biased variants as well as wild type IL-2; and (2) TF-1β cells which are derived from the human erythroleukemia line TF-1, and naturally express only IL-2Rγc, and are engineered to be IL-2 responsive by transfection of IL-2Rβ. TF-10 will be constructed and IL-2R subunit expression levels in both cell lines will be verified by QPCR and FACS analysis.

[1577] Compounds will be tested in both cell lines. Dose response assays will be conducted to determine EC50 of the test compounds and to compare the test compounds with IL-2 as an indicator of IL-2Rβγc receptor bias. To further characterize subunit bias, a parallel assay will be run in the presence of a neutralizing antibody to the human IL-2Rβ subunit.

[1578] As a control to confirm that positive compounds are acting through stimulation of the IL-2 receptor, the assay will also be done with cells treated with neutralizing anti-huIL-2Rβ antibody. To determine that compound activity is not due to contamination with cytokines, test compounds will be treated with neutralizing antibodies (R&D Systems) against the natural IL-2Rβγc agonists, IL-2 and IL-15.

[1579] Compounds exhibiting IL-2R agonist activity in the cell lines will be tested on human primary immune cells, PBMCs, collected from individual donors (commercially available from Lonza), and in some cases on purified CD4+ cells (Lonza). A substantial fraction of PBMCs from normal donors are responsive to IL-2. To assess IL-2 agonist activity of the test compounds, cells will be exposed to the compounds or IL-2 and scored for STAT5 phosphorylation by western blot analysis. As a control to confirm that positive compounds are acting through stimulation of the IL-2 receptor, the assay will also be done with cells treated with neutralizing anti-huRβ antibody.

[1580] Those compounds exhibiting STAT5 activation of PBMCs will be subjected to a follow-on assay designed to assess subunit bias of the compounds compared to IL-2. This assay will involve determining a dose response of the test compounds and IL-2 (1 to 1000 IU) over 30 min, scored by a FACS-based protocol allowing detection of both intracellular pSTAT5 as an indicator of IL-2R activation, and cell surface CD25, the IL-2Rβ subunit. Cells expressing the three IL-2R subunits, IL-2Rβγc, bind IL-2 with very high affinity (about 10 pM) and are therefore sensitive to low concentrations of IL-2; whereas cells expressing only IL-2Rβγc (about 1 nM affinity) require exposure to substantially higher IL-2 levels for activation. Because compounds provided by the present disclosure are selected for binding to the IL-2Rβ and IL-2Rγc subunits, but not to IL-2Rα, the potency of the compounds is expected to be uncorrelated with the level of expression of IL-2Rα on cells; and comparison of response profiles of cells treated with compounds provided by the present disclosure or treated with IL-2 should reveal any bias.

### Example 36

### Identified Peptides

[1581] Stochastic libraries with each library containing approximately 10¹⁰ independent recombinants, with each clone potentially displaying a unique peptide sequence have been screened for binding to human IL-2Rβ or to human Il-2Rγc subunits.

### Example 36

### Preparation of NK-92 Cells for Testing STAT5 Activation of hIL-2R

[1582] NK-92 cells were seeded in a 24-well plate at 4×10⁵ cells, in 1 mL starvation medium (SM), and incubated overnight at 37° C., 5% CO₂. The starvation medium contained RPMI 1640+20% FBS+2 mM L-glutamine+1 mM NaPyr+10 mM HEPES+0.1 mM BME (no rhIL-2 supplement).

[1583] Treatment mixtures were of 1 μg/mL Anti-hIL-2 neutralizing antibody (0.2 mg/mL stock) or goat IgG control (1 mg/mL stock) were prepared.

[1584] The treatment mixtures and the antibody mix were added to the cells for 30 min at 37° C., 5% CO₂.

[1585] Each sample was then transferred to a 1.5 mL microfuge tube and spun down at 1,500 RPM for 5 minutes. The cells were washed in 1 mL PBS and centrifuged again.

[1586] A phosphatase and protease inhibitor cocktail (Thermo #78442) were added to mPER buffer at a 1:100 dilution. After the cells were pelleted, 50 μL of mPER buffer was added to each sample and pipetted repeatedly to homogenize.

[1587] The lysates were centrifuged at 14,000 RPM for 5 min at RT. The supernatants were transferred to clean tubes and stored frozen at −80° C.

[1588] The human IL-2 Antibody (goat IgG) was obtained from R&D Systems No. AF-202-NA; the normal goat IgG Control was obtained from R&D Systems No. AB-108-C; the Anti-STAT5 Antibody (rabbit), the Cell Signaling No. 94205S, the Anti-pSTAT5 Antibody (rabbit), the Cell Signaling No. 4322S, and the Goat anti-rabbit IgG-HRP was obtained from Jackson Immunoresearch No. 111-035-144.

[1589] The antibodies, treatment and working stock prep for each of the samples is provided in Table 18. Compounds A and B are IL-2Rβγc agonists provided by the present disclosure.

TABLE 18
STAT5 activation samples in NK-92 cells.

| | | Vol | | Vol | |
|---|---|---|---|---|---|
| No. | Antibody | (μL) | Treatment | (μL) | Working stock prep |
| 1 | Anti-hIL-2 IgG | 5 | A 10 μM | 100 | 100 μM (1:100 of 10 mM stock in SM) |
| 2 | Anti-hIL-2 IgG | 5 | A 1 μM | 10 | 100 μM (1:100 of 10 mM stock in SM) |
| 3 | Anti-hIL-2 IgG | 5 | A 0.1 μM | 1 | 100 μM (1:100 of 10 mM stock in SM) |
| 4 | Anti-hIL-2 IgG | 5 | B 10 μM | 100 | 100 μM (1:100 of 10 mM stock in SM) |
| 5 | Anti-hIL-2 IgG | 5 | B 1 μM | 10 | 100 μM (1:100 of 10 mM stock in SM) |
| 6 | Anti-hIL-2 IgG | 5 | B 0.1 μM | 1 | 100 μM (1:100 of 10 mM stock in SM) |
| 7 | Anti-hIL-2 IgG | 5 | rh-IL2 1 ng/mL | 10 | 100 ng/mL (1:1000 of 100 μg/mL |
| | | | | | stock in SM) |
| 8 | Anti-hIL-2 IgG | 5 | rhIL-2 0.1 ng/mL | 1 | 100 ng/mL (1:1000 of 100 μg/mL |
| | | | | | stock in SM) |
| 9 | Anti-hIL-2 IgG | 5 | rhIL-2 0.1 ng/mL + | 1 | 100 ng/mL (1:1000 of 100 μg/mL stock in |
| | | | 1% DMSO | | SM) + 10 μL DMSO |
| 10 | Anti-hIL-2 IgG | 5 | Starvation Medium | N/A | N/A |
| | | | (SM) | | |
| 11 | Goat IgG control | 1 | A 10 μM | 100 | 100 μM (1:100 of 10 mM stock in SM) |
| 12 | Goat IgG control | 1 | A 1 μM | 10 | 100 μM (1:100 of 10 mM stock in SM) |
| 13 | Goat IgG control | 1 | A 0.1 μM | 1 | 100 μM (1:100 of 10 mM stock in SM) |
| 14 | Goat IgG control | 1 | B 10 μM | 100 | 100 μM (1:100 of 10 mM stock in SM) |
| 15 | Goat IgG control | 1 | B 1 μM | 10 | 100 μM (1:100 of 10 mM stock in SM) |
| 16 | Goat IgG control | 1 | B 0.1 μM | 1 | 100 μM (1:100 of 10 mM stock in SM) |
| 17 | Goat IgG control | 1 | rh-IL2 1 ng/mL | 10 | 100 ng/mL (1:1000 of 100 μg/mL |
| | | | | | stock in SM) |
| 18 | Goat IgG control | 1 | rhIL-2 0.1 ng/mL | 1 | 100 ng/mL (1:1000 of 100 μg/mL |
| | | | | | stock in SM) |
| 19 | Goat IgG control | 1 | rhIL-2 0.1 ng/mL + | 1 | 100 ng/mL (1:1000 of 100 μg/mL stock in |
| | | | 1% DMSO | | SM) + 10 μL DMSO |
| 20 | Goat IgG control | 1 | Starvation Medium | N/A | N/A |
| | | | (SM) | | |

[1590] The samples were applied to a Western Blot. The treatment reagents included Anti-STAT5 Antibody (rabbit), Cell Signaling No. 94205S; Anti-pSTAT5 Antibody (rabbit), Cell Signaling No. 4322S; and Goat anti-rabbit IgG-HRP, Jackson Immunoresearch No. 111-035-144.

[1591] To perform the assay, NK-92 cells were plated in starvation medium at 20,000 cells/well in a 96-well plate. Treatment was added to each well in 3-fold serial dilutions with the peptides having maximum concentration of 10 μM and rhL-2 having a maximum concentration of 6.67 nM. The cells were then incubated at 37° C. for 48 h. CellTiter-Glo® reagent was added and the cells incubated for 10 min at 25° C. before luminescence reading.

### Example 37

### Preparation of TF-10 and TF-1 Cells for Testing STAT5 Activation of hIL-2R

[1592] TF-1β and TF-1 parental cells were counted. The cells were collected and 2.5×10⁶ cells pelleted at 200×g for 5 minutes. The pelleted cells were washed with 25 mL RPMI with no additives.

[1593] The TF-1β and TF-1 parental cells were seeded at 5×10⁵ cells in a T25 flask, in 5 mL starvation medium (SM), and incubated overnight with the flask upright at 37° C. under 5% CO₂.

[1594] The TF-10 and TF-1 parental cells were counted, and the viability was determined. If necessary, the cells were diluted to 5×10⁵ cells/mL in SM and then 1 mL of the suspension was added to 6 wells/cell line of a 24-well dish and incubate at 37° C. under 5% CO₂.

[1595] The treatments were added to the cells for 30 min at 37° C. under 5% CO₂. The treated cells were transferred to a 1.5 mL microfuge tube and spun down at 1,500 RPM for 5 min. The cells were washed in 1 mL PBS, centrifuged again, and the supernatant aspirated. The treatment reagents included Anti-STAT5 Antibody (rabbit), Cell Signaling No. 94205S; Anti-pSTAT5 Antibody (rabbit), Cell Signaling No. 4322S; and Goat anti-rabbit IgG-HRP, Jackson Immunoresearch No. 111-035-144.

[1596] A phosphatase and protease inhibitor cocktail (Thermo No. 78442) were added to mPER buffer at 1:100 dilution. After the cells were pelleted, add 50 μL of mPER buffer was added to each sample and the mixture repeatedly pipetted to homogenize.

[1597] The lysates were centrifuged at 14,000 RPM for 5 min at 25° C. The supernatants were transferred to clean tubes and stored frozen at −80° C.

[1598] The antibodies, treatment and working stock prep for each of the samples is provided in Table 20.

TABLE 20
STAT5 activation samples in TF-1β and TF-1 cells.

| | | | Vol | |
|---|---|---|---|---|
| # | Cell line | Treatment | (μL) | Working stock prep |
| 1 | TF-1β | A 10 μM | 100 | 100 μM (1:100 of 10 mM stock in SM) |
| 2 | TF-1β | B 10 μM | 100 | 100 μM (1:100 of 10 mM stock in SM) |
| 3 | TF-1β | C 10 μM | 100 | 100 μM (1:100 of 10 mM stock in SM) |
| 4 | TF-1β | rhIL-2 1 ng/mL | 10 | 100 ng/mL (1:1000 of 100 |
| | | | | μg/mL stock in SM) |
| 5 | TF-1β | Starvation Medium¹ | 100 | N/A |
| | | (SM) | | |
| 6 | TF-1 | A 10 μM | 100 | 100 μM (1:100 of 10 mM stock in SM) |
| 7 | TF-1 | B 10 μM | 100 | 100 μM (1:100 of 10 mM stock in SM) |
| 8 | TF-1 | C 10 μM | 100 | 100 μM (1:100 of 10 mM stock in SM) |
| 9 | TF-1 | rhIL-2 1 ng/mL | 10 | 100 ng/mL (1:1000 of 100 |
| | | | | μg/mL stock in SM) |
| 10 | TF-1 | Starvation Medium¹ | 100 | N/A |
| | | (SM) | | |

¹Starvation medium: RPMI 1640, 2.5 g/L glucose (4.5 g/L total), 5% FBS, 2 mM L-glutamine, 1 mM NaPyr, and 10 mM HEPES (no GM-CSF supplement).

[1599] Finally, it should be noted that there are alternative ways of implementing the embodiments disclosed herein. Accordingly, the present embodiments are to be considered as illustrative and not restrictive, and the claims are not to be limited to the details given herein but may be modified within the scope and equivalents thereof.

The application's sequence listing, which the Patent Office published only in electronic form, follows.

SEQUENCE LISTING (9432 sequences)

SEQ ID NO: 1-57 - skipped (57 entries)

SEQ ID NO: 58 - protein, 14 aa, synthetic construct
  REGION 1..14: note = Description of Artificial Sequence: Synthetic peptide
YDCRIAQVGELCDL

SEQ ID NO: 59-82 - skipped (24 entries)

SEQ ID NO: 83 - protein, 14 aa, synthetic construct
  REGION 1..14: note = Description of Artificial Sequence: Synthetic peptide
CCYQAMVGDLCDFC

SEQ ID NO: 84-141 - skipped (58 entries)

SEQ ID NO: 142 - protein, 8 aa, synthetic construct
  REGION 1..8: note = Description of Artificial Sequence: Synthetic peptide
EDALLGDF

SEQ ID NO: 143-168 - skipped (26 entries)

SEQ ID NO: 169 - protein, 14 aa, synthetic construct
  REGION 1..14: note = Description of Artificial Sequence: Synthetic peptide
NMCLVGDYWPSCQI

SEQ ID NO: 170 - protein, 14 aa, synthetic construct
  REGION 1..14: note = Description of Artificial Sequence: Synthetic peptide
QICDVGQWWPDCQV

SEQ ID NO: 171-197 - skipped (27 entries)

SEQ ID NO: 198 - protein, 14 aa, synthetic construct
  REGION 1..14: note = Description of Artificial Sequence: Synthetic peptide
KVCEMWGGVLLCWN

SEQ ID NO: 199-201 - skipped (3 entries)

SEQ ID NO: 202 - protein, 14 aa, synthetic construct
  REGION 1..14: note = Description of Artificial Sequence: Synthetic peptide
RTCTEWENVVLCWV

SEQ ID NO: 203-221 - skipped (19 entries)

SEQ ID NO: 222 - protein, 14 aa, synthetic construct
  REGION 1..14: note = Description of Artificial Sequence: Synthetic peptide
VMCERWQGVELCWL

SEQ ID NO: 223 - skipped

SEQ ID NO: 224 - protein, 12 aa, synthetic construct
  REGION 1..12: note = Description of Artificial Sequence: Synthetic peptide
DCSMWEGVELCW

SEQ ID NO: 225-235 - skipped (11 entries)

SEQ ID NO: 236 - protein, 14 aa, synthetic construct
  REGION 1..14: note = Description of Artificial Sequence: Synthetic peptide
MCWLEWGEWVGSCL

SEQ ID NO: 237-247 - skipped (11 entries)

SEQ ID NO: 248 - protein, 12 aa, synthetic construct
  REGION 1..12: note = Description of Artificial Sequence: Synthetic peptide
DLSDLSTFWLSQ

SEQ ID NO: 249-265 - skipped (17 entries)

SEQ ID NO: 266 - protein, 14 aa, synthetic construct
  REGION 1..14: note = Description of Artificial Sequence: Synthetic peptide
CPSMLQGPERTWVC

SEQ ID NO: 267-611 - skipped (345 entries)

SEQ ID NO: 612 - protein, 14 aa, synthetic construct
  REGION 1..14: note = Description of Artificial Sequence: Synthetic peptide
YPCWMAQLGELCDL

SEQ ID NO: 613-662 - skipped (50 entries)

SEQ ID NO: 663 - protein, 14 aa, synthetic construct
  REGION 1..14: note = Description of Artificial Sequence: Synthetic peptide
YDCRIAQVGELCDL

SEQ ID NO: 664 - protein, 20 aa, synthetic construct
  REGION 1..20: note = Description of Artificial Sequence: Synthetic peptide
YPCHMAQLGELCDLWSWGDI

SEQ ID NO: 665-670 - skipped (6 entries)

SEQ ID NO: 671 - protein, 20 aa, synthetic construct
  REGION 1..20: note = Description of Artificial Sequence: Synthetic peptide
VQYKKCWMAQLGDLCELDPS

SEQ ID NO: 672-804 - skipped (133 entries)

SEQ ID NO: 805 - protein, 17 aa, synthetic construct
  REGION 1..17: note = Description of Artificial Sequence: Synthetic peptide
  MOD_RES 1: note = Any amino acid
  MOD_RES 2: note = Any amino acid comprising an aromatic side chain
  MOD_RES 3: note = Any amino acid comprising a large hydrophobic side chain or an aromatic side chain
  MOD_RES 6: note = Any amino acid comprising an aromatic side chain
  MOD_RES 7: note = Any amino acid comprising a large hydrophobic side chain
  MOD_RES 9: note = Any amino acid comprising a basic side chain or a polar/neutral side chain
  MOD_RES 10: note = Any amino acid comprising a large hydrophobic side chain
  MOD_RES 12: note = Any amino acid comprising an acidic side chain or a polar/neutral side chain
  MOD_RES 16: note = Any amino acid comprising a large hydrophobic side chain
  MOD_RES 17: note = Any amino acid comprising an acidic side chain
XXXPCXXAXXGXLCDXX

SEQ ID NO: 806 - protein, 15 aa, synthetic construct
  REGION 1..15: note = Description of Artificial Sequence: Synthetic peptide
  MOD_RES 1: note = Any amino acid comprising an aromatic side chain
  MOD_RES 2: note = Any amino acid comprising a large hydrophobic side chain or an aromatic side chain
  MOD_RES 5: note = Any amino acid comprising an aromatic side chain
  MOD_RES 6: note = Any amino acid comprising a large hydrophobic side chain
  MOD_RES 8: note = Any amino acid comprising a basic side chain or a polar/neutral side chain
  MOD_RES 9: note = Any amino acid comprising a large hydrophobic side chain
  MOD_RES 11: note = Any amino acid comprising an acidic side chain or a polar/neutral side chain
  MOD_RES 15: note = Any amino acid comprising a large hydrophobic side chain
XXPCXXAXXGXLCDX

SEQ ID NO: 807 - protein, 14 aa, synthetic construct
  REGION 1..14: note = Description of Artificial Sequence: Synthetic peptide
  MOD_RES 1: note = Any amino acid comprising a large hydrophobic side chain or an aromatic side chain
  MOD_RES 4: note = Any amino acid comprising an aromatic side chain
  MOD_RES 5: note = Any amino acid comprising a large hydrophobic side chain
  MOD_RES 7: note = Any amino acid comprising a basic side chain or a polar/neutral side chain
  MOD_RES 8: note = Any amino acid comprising a large hydrophobic side chain
  MOD_RES 10: note = Any amino acid comprising an acidic side chain or a polar/neutral side chain
  MOD_RES 14: note = Any amino acid comprising a large hydrophobic side chain
XPCXXAXXGXLCDX

SEQ ID NO: 808 - protein, 12 aa, synthetic construct
  REGION 1..12: note = Description of Artificial Sequence: Synthetic peptide
  MOD_RES 3: note = Any amino acid comprising an aromatic side chain
  MOD_RES 4: note = Any amino acid comprising a large hydrophobic side chain
  MOD_RES 6: note = Any amino acid comprising a basic side chain or a polar/neutral side chain
  MOD_RES 7: note = Any amino acid comprising a large hydrophobic side chain
  MOD_RES 9: note = Any amino acid comprising an acidic side chain or a polar/neutral side chain
PCXXAXXGXLCD

SEQ ID NO: 809 - protein, 10 aa, synthetic construct
  REGION 1..10: note = Description of Artificial Sequence: Synthetic peptide
  MOD_RES 2: note = Any amino acid comprising an aromatic side chain
  MOD_RES 3: note = Any amino acid comprising a large hydrophobic side chain
  MOD_RES 5: note = Any amino acid comprising a basic side chain or a polar/neutral side chain
  MOD_RES 6: note = Any amino acid comprising a large hydrophobic side chain
  MOD_RES 8: note = Any amino acid comprising an acidic side chain or a polar/neutral side chain
CXXAXXGXLC

SEQ ID NO: 810 - protein, 20 aa, synthetic construct
  REGION 1..20: note = Description of Artificial Sequence: Synthetic peptide
QPCWLAQVGDLCDLLWPGPL

SEQ ID NO: 811 - protein, 16 aa, synthetic construct
  REGION 1..16: note = Description of Artificial Sequence: Synthetic peptide
WLPCWIARLGDLCDLE

SEQ ID NO: 812 - protein, 16 aa, synthetic construct
  REGION 1..16: note = Description of Artificial Sequence: Synthetic peptide
WYPCWMALLGELCDQE

SEQ ID NO: 813 - protein, 16 aa, synthetic construct
  REGION 1..16: note = Description of Artificial Sequence: Synthetic peptide
WYPCYRARLGELCDLD

SEQ ID NO: 814 - protein, 22 aa, synthetic construct
  REGION 1..22: note = Description of Artificial Sequence: Synthetic peptide
WQREWRWFPCWMAKLGDMCDLD

SEQ ID NO: 815 - protein, 22 aa, synthetic construct
  REGION 1..22: note = Description of Artificial Sequence: Synthetic peptide
QDEAVEWFPCWMARLGELCDLE

SEQ ID NO: 816 - protein, 16 aa, synthetic construct
  REGION 1..16: note = Description of Artificial Sequence: Synthetic peptide
YYPCWMARLGELCDLD

SEQ ID NO: 817 - protein, 22 aa, synthetic construct
  REGION 1..22: note = Description of Artificial Sequence: Synthetic peptide
SVVVNNWLPCWMAQLGELCDLD

SEQ ID NO: 818 - protein, 16 aa, synthetic construct
  REGION 1..16: note = Description of Artificial Sequence: Synthetic peptide
WYPCWLAQLGDLCDLD

SEQ ID NO: 819 - protein, 22 aa, synthetic construct
  REGION 1..22: note = Description of Artificial Sequence: Synthetic peptide
VMSPTRWLPCWIAKLGELCDLE

SEQ ID NO: 820 - protein, 16 aa, synthetic construct
  REGION 1..16: note = Description of Artificial Sequence: Synthetic peptide
WFPCWMAQLGQLCDLE

SEQ ID NO: 821 - protein, 22 aa, synthetic construct
  REGION 1..22: note = Description of Artificial Sequence: Synthetic peptide
WRPCWRAYLGELCDLEAMPRAT

SEQ ID NO: 822 - protein, 22 aa, synthetic construct
  REGION 1..22: note = Description of Artificial Sequence: Synthetic peptide
IRSCSPCWSADVGELCDLECEW

SEQ ID NO: 823 - protein, 22 aa, synthetic construct
  REGION 1..22: note = Description of Artificial Sequence: Synthetic peptide
SGHWYPCWMARLGELCDMEERA

SEQ ID NO: 824 - protein, 22 aa, synthetic construct
  REGION 1..22: note = Description of Artificial Sequence: Synthetic peptide
WYPCWMAQLGELCDLQTMGYSH

SEQ ID NO: 825 - protein, 22 aa, synthetic construct
  REGION 1..22: note = Description of Artificial Sequence: Synthetic peptide
AGDWLPCWMAELGELCDLEGPT

SEQ ID NO: 826 - protein, 22 aa, synthetic construct
  REGION 1..22: note = Description of Artificial Sequence: Synthetic peptide
WLPCWIASLGELCDLDTGKRQG

SEQ ID NO: 827 - protein, 22 aa, synthetic construct
  REGION 1..22: note = Description of Artificial Sequence: Synthetic peptide
WLPCWMAHLGQLCDLDLPGKSM

SEQ ID NO: 828 - protein, 22 aa, synthetic construct
  REGION 1..22: note = Description of Artificial Sequence: Synthetic peptide
EGVFFPCWIARLGELCDLDHGL

SEQ ID NO: 829 - protein, 22 aa, synthetic construct
  REGION 1..22: note = Description of Artificial Sequence: Synthetic peptide
TGRWKPCWMAGLHELCDLEGFR

SEQ ID NO: 830 - protein, 22 aa, synthetic construct
  REGION 1..22: note = Description of Artificial Sequence: Synthetic peptide
RKHFYPCWMAQLGELCDLEGMP

SEQ ID NO: 831 - protein, 22 aa, synthetic construct
  REGION 1..22: note = Description of Artificial Sequence: Synthetic peptide
DIGYYPCWMAQVGDLCDLDDEK

SEQ ID NO: 832 - protein, 22 aa, synthetic construct
  REGION 1..22: note = Description of Artificial Sequence: Synthetic peptide
DSDWWPCWMAQLGELCDLEDAR

SEQ ID NO: 833 - protein, 22 aa, synthetic construct
  REGION 1..22: note = Description of Artificial Sequence: Synthetic peptide
GERWKPCWIAQLGELCDLDFNW

SEQ ID NO: 834 - protein, 22 aa, synthetic construct
  REGION 1..22: note = Description of Artificial Sequence: Synthetic peptide
WWPCWMAQLGEMCDLEYPYVPG

SEQ ID NO: 835 - protein, 22 aa, synthetic construct
  REGION 1..22: note = Description of Artificial Sequence: Synthetic peptide
QTKLEGWYPCWMAQLGELCDLD

SEQ ID NO: 836 - protein, 22 aa, synthetic construct
  REGION 1..22: note = Description of Artificial Sequence: Synthetic peptide
WGRKEQWLPCWKAQLGELCDLE

SEQ ID NO: 837 - protein, 22 aa, synthetic construct
  REGION 1..22: note = Description of Artificial Sequence: Synthetic peptide
VPRANAWHPCWMAQLGELCDLE

SEQ ID NO: 838 - protein, 22 aa, synthetic construct
  REGION 1..22: note = Description of Artificial Sequence: Synthetic peptide
GRQQKGWYPCWLAQLGELCDME

SEQ ID NO: 839 - protein, 22 aa, synthetic construct
  REGION 1..22: note = Description of Artificial Sequence: Synthetic peptide
WLNRHLFNPCWMARLGELCDLE

SEQ ID NO: 840 - protein, 22 aa, synthetic construct
  REGION 1..22: note = Description of Artificial Sequence: Synthetic peptide
AQVRREWYPCWMAQLGELCDLT

SEQ ID NO: 841 - protein, 22 aa, synthetic construct
  REGION 1..22: note = Description of Artificial Sequence: Synthetic peptide
ETEQMSWYPCWVAQLWELCDLD

SEQ ID NO: 842 - protein, 21 aa, synthetic construct
  REGION 1..21: note = Description of Artificial Sequence: Synthetic peptide
WLPCWLAKLGELCDLEWLPCW

SEQ ID NO: 843 - protein, 22 aa, synthetic construct
  REGION 1..22: note = Description of Artificial Sequence: Synthetic peptide
ERRPDTWFPCWRALVGELCDLE

SEQ ID NO: 844 - protein, 22 aa, synthetic construct
  REGION 1..22: note = Description of Artificial Sequence: Synthetic peptide
WGRNRSWYPCWMAQLGELCDLE

SEQ ID NO: 845 - protein, 22 aa, synthetic construct
  REGION 1..22: note = Description of Artificial Sequence: Synthetic peptide
QDRRSPWYPCWMAKLGELCDLA

SEQ ID NO: 846 - protein, 24 aa, synthetic construct
  REGION 1..24: note = Description of Artificial Sequence: Synthetic peptide
TRRWYPCYLAKLGELCDLFEGGTR

SEQ ID NO: 847 - protein, 24 aa, synthetic construct
  REGION 1..24: note = Description of Artificial Sequence: Synthetic peptide
SEQWWPCWIARLGELCDLDRELSE

SEQ ID NO: 848 - protein, 25 aa, synthetic construct
  REGION 1..25: note = Description of Artificial Sequence: Synthetic peptide
WYPCWVAQLGEICDLEMTGPDSWYP

SEQ ID NO: 849 - protein, 22 aa, synthetic construct
  REGION 1..22: note = Description of Artificial Sequence: Synthetic peptide
QDGWLPCWMAQLGELCDLEYKR

SEQ ID NO: 850 - protein, 22 aa, synthetic construct
  REGION 1..22: note = Description of Artificial Sequence: Synthetic peptide
NRRWYPCWMAQLGELCDLDSRP

SEQ ID NO: 851 - protein, 22 aa, synthetic construct
  REGION 1..22: note = Description of Artificial Sequence: Synthetic peptide
FYPCWMAHLGELCDLDGDTDSM

SEQ ID NO: 852 - protein, 22 aa, synthetic construct
  REGION 1..22: note = Description of Artificial Sequence: Synthetic peptide
KSNFFPCWIAQLGQLCDLEPET

SEQ ID NO: 853 - protein, 22 aa, synthetic construct
  REGION 1..22: note = Description of Artificial Sequence: Synthetic peptide
FYPCWMANLGELCDLDFLRELN

SEQ ID NO: 854 - protein, 22 aa, synthetic construct
  REGION 1..22: note = Description of Artificial Sequence: Synthetic peptide
HASWLPCWLAQLGELCDLEPNP

SEQ ID NO: 855 - protein, 22 aa, synthetic construct
  REGION 1..22: note = Description of Artificial Sequence: Synthetic peptide
NGAWYPCWMAQVGELCDLEERW

SEQ ID NO: 856 - protein, 22 aa, synthetic construct
  REGION 1..22: note = Description of Artificial Sequence: Synthetic peptide
WRRWYPCWVAQVGELCDLEIEA

SEQ ID NO: 857 - protein, 22 aa, synthetic construct
  REGION 1..22: note = Description of Artificial Sequence: Synthetic peptide
RQAWYPCWMAQLGELCDLEAEL

SEQ ID NO: 858 - protein, 22 aa, synthetic construct
  REGION 1..22: note = Description of Artificial Sequence: Synthetic peptide
RQRWYPCWMARLGELCDLDEPT

SEQ ID NO: 859 - protein, 22 aa, synthetic construct
  REGION 1..22: note = Description of Artificial Sequence: Synthetic peptide
NNSREGWFPCWLAKLGDLCDLD

SEQ ID NO: 860 - protein, 16 aa, synthetic construct
  REGION 1..16: note = Description of Artificial Sequence: Synthetic peptide
YYPCWMAQLGELCDLE

SEQ ID NO: 861 - protein, 16 aa, synthetic construct
  REGION 1..16: note = Description of Artificial Sequence: Synthetic peptide
WYPCWLAQLGELCDLD

SEQ ID NO: 862 - protein, 22 aa, synthetic construct
  REGION 1..22: note = Description of Artificial Sequence: Synthetic peptide
SWHAETWYPCWLAQVGELCDLD

SEQ ID NO: 863 - protein, 22 aa, synthetic construct
  REGION 1..22: note = Description of Artificial Sequence: Synthetic peptide
KMHKAVWLPCWMAQVGELCDLE

SEQ ID NO: 864 - protein, 22 aa, synthetic construct
  REGION 1..22: note = Description of Artificial Sequence: Synthetic peptide
DVLGDRWYPCWIAKLGELCDLD

SEQ ID NO: 865 - protein, 16 aa, synthetic construct
  REGION 1..16: note = Description of Artificial Sequence: Synthetic peptide
WYPCWMAQLGELCDLD

SEQ ID NO: 866 - protein, 22 aa, synthetic construct
  REGION 1..22: note = Description of Artificial Sequence: Synthetic peptide
KLQSWRWYPCWMAQLGELCDLD

SEQ ID NO: 867 - protein, 22 aa, synthetic construct
  REGION 1..22: note = Description of Artificial Sequence: Synthetic peptide
NEPEGGFYPCWLAQLGELCDLH

SEQ ID NO: 868 - protein, 16 aa, synthetic construct
  REGION 1..16: note = Description of Artificial Sequence: Synthetic peptide
WYPCWMARLGELCDLE

SEQ ID NO: 869 - protein, 22 aa, synthetic construct
  REGION 1..22: note = Description of Artificial Sequence: Synthetic peptide
FYPCWTALLGELCDLEPGPPAM

SEQ ID NO: 870 - protein, 22 aa, synthetic construct
  REGION 1..22: note = Description of Artificial Sequence: Synthetic peptide
WGTTWRWYPCWMAQLGELCDLE

SEQ ID NO: 871 - protein, 22 aa, synthetic construct
  REGION 1..22: note = Description of Artificial Sequence: Synthetic peptide
AKGWDTWKPCWLANLGELCDLE

SEQ ID NO: 872 - protein, 22 aa, synthetic construct
  REGION 1..22: note = Description of Artificial Sequence: Synthetic peptide
RDESAGYYPCWIAQLGELCDLE

SEQ ID NO: 873 - protein, 16 aa, synthetic construct
  REGION 1..16: note = Description of Artificial Sequence: Synthetic peptide
WYPCWIAKLGELCDLE

SEQ ID NO: 874 - protein, 16 aa, synthetic construct
  REGION 1..16: note = Description of Artificial Sequence: Synthetic peptide
WYPCWIAQLGELCDLD

SEQ ID NO: 875 - protein, 16 aa, synthetic construct
  REGION 1..16: note = Description of Artificial Sequence: Synthetic peptide
WYPCWLAKLGELCDLD

SEQ ID NO: 876 - protein, 22 aa, synthetic construct
  REGION 1..22: note = Description of Artificial Sequence: Synthetic peptide
QGPVRLWYPCWMAQLGELCDLD

SEQ ID NO: 877 - protein, 16 aa, synthetic construct
  REGION 1..16: note = Description of Artificial Sequence: Synthetic peptide
WYPCWMAQPGELCDVD

SEQ ID NO: 878 - protein, 16 aa, synthetic construct
  REGION 1..16: note = Description of Artificial Sequence: Synthetic peptide
WHPCWIAQLGELCDLE

SEQ ID NO: 879 - protein, 16 aa, synthetic construct
  REGION 1..16: note = Description of Artificial Sequence: Synthetic peptide
WYPCWIAQLGELCDLE

SEQ ID NO: 880 - protein, 22 aa, synthetic construct
  REGION 1..22: note = Description of Artificial Sequence: Synthetic peptide
VRPMGVWYPCWIAQLGELCDLV

SEQ ID NO: 881 - protein, 22 aa, synthetic construct
  REGION 1..22: note = Description of Artificial Sequence: Synthetic peptide
VPRWYPCWIAQLGELCDLDSDD

SEQ ID NO: 882 - protein, 22 aa, synthetic construct
  REGION 1..22: note = Description of Artificial Sequence: Synthetic peptide
YRGWLPCWRAKLGDLCDLGQPM

SEQ ID NO: 883 - protein, 22 aa, synthetic construct
  REGION 1..22: note = Description of Artificial Sequence: Synthetic peptide
GEAWYPCWLARLGELCDMDPRV

SEQ ID NO: 884 - protein, 22 aa, synthetic construct
  REGION 1..22: note = Description of Artificial Sequence: Synthetic peptide
WYPCWMAQLGELCDLDESTRLT

SEQ ID NO: 885 - protein, 22 aa, synthetic construct
  REGION 1..22: note = Description of Artificial Sequence: Synthetic peptide
IGSWWPCWMAQLGELCDLEPEL

SEQ ID NO: 886 - protein, 22 aa, synthetic construct
  REGION 1..22: note = Description of Artificial Sequence: Synthetic peptide
GTTWYPCWLAQLGELCDLDVLE

SEQ ID NO: 887 - protein, 22 aa, synthetic construct
  REGION 1..22: note = Description of Artificial Sequence: Synthetic peptide
WWPCWMAQLGDLCDLEETSGGT

SEQ ID NO: 888 - protein, 22 aa, synthetic construct
  REGION 1..22: note = Description of Artificial Sequence: Synthetic peptide
WYPCWMAQLGELCDLGPTESNL

SEQ ID NO: 889 - protein, 22 aa, synthetic construct
  REGION 1..22: note = Description of Artificial Sequence: Synthetic peptide
WYPCWMANLGELCDLEYPSWAQ

SEQ ID NO: 890 - protein, 22 aa, synthetic construct
  REGION 1..22: note = Description of Artificial Sequence: Synthetic peptide
RGMCYPCWFARLGELCDLECDQ

SEQ ID NO: 891 - protein, 22 aa, synthetic construct
  REGION 1..22: note = Description of Artificial Sequence: Synthetic peptide
WYPCWMAQLGELCDLDAGARHL

SEQ ID NO: 892 - protein, 22 aa, synthetic construct
  REGION 1..22: note = Description of Artificial Sequence: Synthetic peptide
KSGWYPCWMAKLGELCDLEAQP

SEQ ID NO: 893 - protein, 22 aa, synthetic construct
  REGION 1..22: note = Description of Artificial Sequence: Synthetic peptide
GPRFYPCWIAQLGELCDLEDMG

SEQ ID NO: 894 - protein, 22 aa, synthetic construct
  REGION 1..22: note = Description of Artificial Sequence: Synthetic peptide
RVTWYPCWMAQLGELCDLEESV

SEQ ID NO: 895 - protein, 22 aa, synthetic construct
  REGION 1..22: note = Description of Artificial Sequence: Synthetic peptide
WLPCWMAQLGDLCDLEQYVPLP

SEQ ID NO: 896 - protein, 22 aa, synthetic construct
  REGION 1..22: note = Description of Artificial Sequence: Synthetic peptide
YLPCWMAHLGELCDLDSPLKAR

SEQ ID NO: 897 - protein, 22 aa, synthetic construct
  REGION 1..22: note = Description of Artificial Sequence: Synthetic peptide
WYPCWMAQLGELCDLDDHWPAM

SEQ ID NO: 898 - protein, 22 aa, synthetic construct
  REGION 1..22: note = Description of Artificial Sequence: Synthetic peptide
WYPCWRAQLGELCDLDPPIAVE

SEQ ID NO: 899 - protein, 22 aa, synthetic construct
  REGION 1..22: note = Description of Artificial Sequence: Synthetic peptide
WYPCWMANLGELCDLEAERSPV

SEQ ID NO: 900 - protein, 22 aa, synthetic construct
  REGION 1..22: note = Description of Artificial Sequence: Synthetic peptide
RDQYYPCWMAQLGELCDLDEVF

SEQ ID NO: 901 - protein, 22 aa, synthetic construct
  REGION 1..22: note = Description of Artificial Sequence: Synthetic peptide
WYPCWMAQLGDLCDLEKPVTER

SEQ ID NO: 902 - protein, 22 aa, synthetic construct
  REGION 1..22: note = Description of Artificial Sequence: Synthetic peptide
WYPCWIARLGELCDLETSGGFP

SEQ ID NO: 903 - protein, 21 aa, synthetic construct
  REGION 1..21: note = Description of Artificial Sequence: Synthetic peptide
SGHCYPCWLAGLGELCDLNCG

SEQ ID NO: 904-910 - skipped (7 entries)

SEQ ID NO: 911 - protein, 18 aa, synthetic construct
  REGION 1..18: note = Description of Artificial Sequence: Synthetic peptide
GGYDCRIAQVGELCDLGG

SEQ ID NO: 912 - protein, 23 aa, synthetic construct
  REGION 1..23: note = Description of Artificial Sequence: Synthetic peptide
GVQYKKCWMAQLGDLCELDPSGG

SEQ ID NO: 913 - protein, 20 aa, synthetic construct
  REGION 1..20: note = Description of Artificial Sequence: Synthetic peptide
GGYPCWMAQLGELCDLGGRR

SEQ ID NO: 914 - skipped

SEQ ID NO: 915 - protein, 22 aa, synthetic construct
  REGION 1..22: note = Description of Artificial Sequence: Synthetic peptide
GGWYPCWMAQLGELCDLDGGRR

SEQ ID NO: 916 - protein, 26 aa, synthetic construct
  REGION 1..26: note = Description of Artificial Sequence: Synthetic peptide
GGYPCHMAQLGELCDLWSWGDIGGRR

SEQ ID NO: 917 - protein, 24 aa, synthetic construct
  REGION 1..24: note = Description of Artificial Sequence: Synthetic peptide
FYPCWTALLGELCDLEPGPPAMGG

SEQ ID NO: 918 - protein, 24 aa, synthetic construct
  REGION 1..24: note = Description of Artificial Sequence: Synthetic peptide
WRRWYPCWVAQVGELCDLEIEAGG

SEQ ID NO: 919 - protein, 24 aa, synthetic construct
  REGION 1..24: note = Description of Artificial Sequence: Synthetic peptide
RQRWYPCWMARLGELCDLDEPTGG

SEQ ID NO: 920 - protein, 24 aa, synthetic construct
  REGION 1..24: note = Description of Artificial Sequence: Synthetic peptide
WYPCWMAQLGDLCDLEKPVTERGG

SEQ ID NO: 921 - protein, 26 aa, synthetic construct
  REGION 1..26: note = Description of Artificial Sequence: Synthetic peptide
GGFYPCWTALLGELCDLEPGPPAMGG

SEQ ID NO: 922 - protein, 26 aa, synthetic construct
  REGION 1..26: note = Description of Artificial Sequence: Synthetic peptide
GGWGTTWRWYPCWMAQLGELCDLEGG

SEQ ID NO: 923 - protein, 25 aa, synthetic construct
  REGION 1..25: note = Description of Artificial Sequence: Synthetic peptide
GGDVLGDRWYPCWIAKGELCDLDGG

SEQ ID NO: 924 - protein, 19 aa, synthetic construct
  REGION 1..19: note = Description of Artificial Sequence: Synthetic peptide
GGWPCWIAQLGELCDLDGG

SEQ ID NO: 925 - protein, 20 aa, synthetic construct
  REGION 1..20: note = Description of Artificial Sequence: Synthetic peptide
GGWYPCWLAKLGELCDLDGG

SEQ ID NO: 926 - protein, 26 aa, synthetic construct
  REGION 1..26: note = Description of Artificial Sequence: Synthetic peptide
GGWYPCWMAQLGDLCDLEKPVTERGG

SEQ ID NO: 927 - protein, 26 aa, synthetic construct
  REGION 1..26: note = Description of Artificial Sequence: Synthetic peptide
GGWRRWYPCWVAQVGELCDLEIEAGG

SEQ ID NO: 928 - protein, 26 aa, synthetic construct
  REGION 1..26: note = Description of Artificial Sequence: Synthetic peptide
GGRQRWYPCWMARLGELCDLDEPTGG

SEQ ID NO: 929 - protein, 24 aa, synthetic construct
  REGION 1..24: note = Description of Artificial Sequence: Synthetic peptide
GGVQYKKCWMAQLGDLCELDPSGG

SEQ ID NO: 930 - protein, 24 aa, synthetic construct
  REGION 1..24: note = Description of Artificial Sequence: Synthetic peptide
GGYPCHMAQLGELCDLWSWGDIGG

SEQ ID NO: 931-943 - skipped (13 entries)

SEQ ID NO: 944 - protein, 20 aa, synthetic construct
  REGION 1..20: note = Description of Artificial Sequence: Synthetic peptide
  MOD_RES 1: note = Any amino acid comprising a basic side chain
  MOD_RES 2: note = Any amino acid comprising a hydroxyl-containing side chain
  MOD_RES 3: note = Any amino acid comprising an acidic side chain or a large hydrophobic side chain
  MOD_RES 4: note = Any amino acid comprising a large hydrophobic side chain
  MOD_RES 5: note = Any amino acid comprising an acidic side chain or a large hydrophobic side chain
  MOD_RES 7: note = Any amino acid comprising an acidic side chain or a polar/neutral side chain
  MOD_RES 8: note = Any amino acid comprising an acidic side chain
  MOD_RES 9: note = Any amino acid comprising a large hydrophobic side chain or an aromatic side chain
  MOD_RES 10: note = Any amino acid comprising an acidic side chain or a polar/neutral side chain
  MOD_RES 17: note = Any amino acid comprising a large hydrophobic side chain
  MOD_RES 19: note = Any amino acid
  MOD_RES 20: note = Any amino acid comprising an acidic side chain
XXXXXCXXXXGVELCWXEXX

SEQ ID NO: 945 - protein, 18 aa, synthetic construct
  REGION 1..18: note = Description of Artificial Sequence: Synthetic peptide
  MOD_RES 1: note = Any amino acid comprising a hydroxyl-containing side chain
  MOD_RES 2: note = Any amino acid comprising an acidic side chain or a large hydrophobic side chain
  MOD_RES 3: note = Any amino acid comprising a large hydrophobic side chain
  MOD_RES 4: note = Any amino acid comprising an acidic side chain or a large hydrophobic side chain
  MOD_RES 6: note = Any amino acid comprising an acidic side chain or a polar/neutral side chain
  MOD_RES 7: note = Any amino acid comprising an acidic side chain
  MOD_RES 8: note = Any amino acid comprising a large hydrophobic side chain or an aromatic side chain
  MOD_RES 9: note = Any amino acid comprising an acidic side chain or a polar/neutral side chain
  MOD_RES 16: note = Any amino acid comprising a large hydrophobic side chain
  MOD_RES 18: note = Any amino acid
XXXXCXXXXGVELCWXEX

SEQ ID NO: 946 - protein, 16 aa, synthetic construct
  REGION 1..16: note = Description of Artificial Sequence: Synthetic peptide
  MOD_RES 1: note = Any amino acid comprising an acidic side chain or a large hydrophobic side chain
  MOD_RES 2: note = Any amino acid comprising a large hydrophobic side chain
  MOD_RES 3: note = Any amino acid comprising an acidic side chain or a large hydrophobic side chain
  MOD_RES 5: note = Any amino acid comprising an acidic side chain or a polar/neutral side chain
  MOD_RES 6: note = Any amino acid comprising an acidic side chain
  MOD_RES 7: note = Any amino acid comprising a large hydrophobic side chain or an aromatic side chain
  MOD_RES 8: note = Any amino acid comprising an acidic side chain or a polar/neutral side chain
  MOD_RES 15: note = Any amino acid comprising a large hydrophobic side chain
XXXCXXXXGVELCWXE

SEQ ID NO: 947 - protein, 14 aa, synthetic construct
  REGION 1..14: note = Description of Artificial Sequence: Synthetic peptide
  MOD_RES 1: note = Any amino acid comprising a large hydrophobic side chain
  MOD_RES 2: note = Any amino acid comprising an acidic side chain or a large hydrophobic side chain
  MOD_RES 4: note = Any amino acid comprising an acidic side chain or a polar/neutral side chain
  MOD_RES 5: note = Any amino acid comprising an acidic side chain
  MOD_RES 6: note = Any amino acid comprising a large hydrophobic side chain or an aromatic side chain
  MOD_RES 7: note = Any amino acid comprising an acidic side chain or a polar/neutral side chain
  MOD_RES 14: note = Any amino acid comprising a large hydrophobic side chain
XXCXXXXGVELCWX

SEQ ID NO: 948 - protein, 12 aa, synthetic construct
  REGION 1..12: note = Description of Artificial Sequence: Synthetic peptide
  MOD_RES 1: note = Any amino acid comprising an acidic side chain or a large hydrophobic side chain
  MOD_RES 3: note = Any amino acid comprising an acidic side chain or a polar/neutral side chain
  MOD_RES 4: note = Any amino acid comprising an acidic side chain
  MOD_RES 5: note = Any amino acid comprising a large hydrophobic side chain or an aromatic side chain
  MOD_RES 6: note = Any amino acid comprising an acidic side chain or a polar/neutral side chain
XCXXXXGVELCW

SEQ ID NO: 949 - protein, 10 aa, synthetic construct
  REGION 1..10: note = Description of Artificial Sequence: Synthetic peptide
  MOD_RES 2: note = Any amino acid comprising an acidic side chain or a polar/neutral side chain
  MOD_RES 3: note = Any amino acid comprising an acidic side chain
  MOD_RES 4: note = Any amino acid comprising a large hydrophobic side chain or an aromatic side chain
  MOD_RES 5: note = Any amino acid comprising an acidic side chain or a polar/neutral side chain
CXXXXGVELC

SEQ ID NO: 950 - protein, 14 aa, synthetic construct
  REGION 1..14: note = Description of Artificial Sequence: Synthetic peptide
IECDTSYGVYICWQ

SEQ ID NO: 951 - protein, 14 aa, synthetic construct
  REGION 1..14: note = Description of Artificial Sequence: Synthetic peptide
IECEEWRGVELCWQ

SEQ ID NO: 952 - protein, 20 aa, synthetic construct
  REGION 1..20: note = Description of Artificial Sequence: Synthetic peptide
PEGREVVVCRDWYGVELCWQ

SEQ ID NO: 953 - protein, 20 aa, synthetic construct
  REGION 1..20: note = Description of Artificial Sequence: Synthetic peptide
IWGRTVVECQDWEGVELCWQ

SEQ ID NO: 954 - protein, 20 aa, synthetic construct
  REGION 1..20: note = Description of Artificial Sequence: Synthetic peptide
LALRKEVVCQEYYGVELCWI

SEQ ID NO: 955 - protein, 20 aa, synthetic construct
  REGION 1..20: note = Description of Artificial Sequence: Synthetic peptide
HEAREVVVCQDWYGVELCWQ

SEQ ID NO: 956 - protein, 20 aa, synthetic construct
  REGION 1..20: note = Description of Artificial Sequence: Synthetic peptide
MVNREVVVCEDWYGVELCWQ

SEQ ID NO: 957 - protein, 20 aa, synthetic construct
  REGION 1..20: note = Description of Artificial Sequence: Synthetic peptide
TANQTVVECQVWGGVELCWQ

SEQ ID NO: 958 - protein, 14 aa, synthetic construct
  REGION 1..14: note = Description of Artificial Sequence: Synthetic peptide
VECQEWGGVELCWC

SEQ ID NO: 959 - protein, 15 aa, synthetic construct
  REGION 1..15: note = Description of Artificial Sequence: Synthetic peptide
DVECVDWGGVELCWH

SEQ ID NO: 960 - protein, 14 aa, synthetic construct
  REGION 1..14: note = Description of Artificial Sequence: Synthetic peptide
IVCEEWRGVELCWL

SEQ ID NO: 961 - protein, 20 aa, synthetic construct
  REGION 1..20: note = Description of Artificial Sequence: Synthetic peptide
DFERSYVVCQDWDGVELCWI

SEQ ID NO: 962 - protein, 20 aa, synthetic construct
  REGION 1..20: note = Description of Artificial Sequence: Synthetic peptide
AHSRQEVVCEEWYGVELCWI

SEQ ID NO: 963 - protein, 20 aa, synthetic construct
  REGION 1..20: note = Description of Artificial Sequence: Synthetic peptide
SAPERWVECEDWQGVELCWV

SEQ ID NO: 964 - protein, 20 aa, synthetic construct
  REGION 1..20: note = Description of Artificial Sequence: Synthetic peptide
YSRELYVQCEDWEGVELCWI

SEQ ID NO: 965 - protein, 14 aa, synthetic construct
  REGION 1..14: note = Description of Artificial Sequence: Synthetic peptide
VVCQDWEGVELCWQ

SEQ ID NO: 966 - protein, 15 aa, synthetic construct
  REGION 1..15: note = Description of Artificial Sequence: Synthetic peptide
DVVCQNWEGVDLCWH

SEQ ID NO: 967 - protein, 20 aa, synthetic construct
  REGION 1..20: note = Description of Artificial Sequence: Synthetic peptide
SAGRQEVVCQDWNGVELCWI

SEQ ID NO: 968 - protein, 20 aa, synthetic construct
  REGION 1..20: note = Description of Artificial Sequence: Synthetic peptide
GQGREVVVCHDWYGVELCWQ

SEQ ID NO: 969 - protein, 20 aa, synthetic construct
  REGION 1..20: note = Description of Artificial Sequence: Synthetic peptide
DWRRSVVECQDWYGVELCWQ

SEQ ID NO: 970 - protein, 15 aa, synthetic construct
  REGION 1..15: note = Description of Artificial Sequence: Synthetic peptide
DVVCQNWDGVDLCWH

SEQ ID NO: 971 - protein, 20 aa, synthetic construct
  REGION 1..20: note = Description of Artificial Sequence: Synthetic peptide
TLGRTVVECQDWGGVELCWQ

SEQ ID NO: 972 - protein, 20 aa, synthetic construct
  REGION 1..20: note = Description of Artificial Sequence: Synthetic peptide
RLLNSVVECLDWEGVELCWQ

SEQ ID NO: 973 - protein, 14 aa, synthetic construct
  REGION 1..14: note = Description of Artificial Sequence: Synthetic peptide
IVCEDWRGVELCWI

SEQ ID NO: 974 - protein, 14 aa, synthetic construct
  REGION 1..14: note = Description of Artificial Sequence: Synthetic peptide
VVCQEWEGVELCWC

SEQ ID NO: 975 - protein, 20 aa, synthetic construct
  REGION 1..20: note = Description of Artificial Sequence: Synthetic peptide
GDRPKEVVCEDWKGVELCWI

SEQ ID NO: 976 - protein, 20 aa, synthetic construct
  REGION 1..20: note = Description of Artificial Sequence: Synthetic peptide
ERPRSFIECQEWEGVELCWL

SEQ ID NO: 977 - protein, 20 aa, synthetic construct
  REGION 1..20: note = Description of Artificial Sequence: Synthetic peptide
EGSTTTIECEEWAGVELCWL

SEQ ID NO: 978 - protein, 20 aa, synthetic construct
  REGION 1..20: note = Description of Artificial Sequence: Synthetic peptide
ANQNTVVECQDWHGVELCWQ

SEQ ID NO: 979 - protein, 20 aa, synthetic construct
  REGION 1..20: note = Description of Artificial Sequence: Synthetic peptide
RSDDEVVVCQEWEGVELCWQ

SEQ ID NO: 980 - protein, 14 aa, synthetic construct
  REGION 1..14: note = Description of Artificial Sequence: Synthetic peptide
IECEEWAGVELCWL

SEQ ID NO: 981 - protein, 20 aa, synthetic construct
  REGION 1..20: note = Description of Artificial Sequence: Synthetic peptide
TWNMSELECQDWNGVEICWH

SEQ ID NO: 982 - protein, 20 aa, synthetic construct
  REGION 1..20: note = Description of Artificial Sequence: Synthetic peptide
GNDDSYIVCEEWKGVELCWI

SEQ ID NO: 983 - protein, 20 aa, synthetic construct
  REGION 1..20: note = Description of Artificial Sequence: Synthetic peptide
FAHHGVVECQEWYGVELCWQ

SEQ ID NO: 984 - protein, 20 aa, synthetic construct
  REGION 1..20: note = Description of Artificial Sequence: Synthetic peptide
LNRSVWIECEEYEGVELCWL

SEQ ID NO: 985 - protein, 20 aa, synthetic construct
  REGION 1..20: note = Description of Artificial Sequence: Synthetic peptide
WSKKAEVVCEEWGGVEFCWI

SEQ ID NO: 986 - protein, 20 aa, synthetic construct
  REGION 1..20: note = Description of Artificial Sequence: Synthetic peptide
RSNQTVVECQDWEGVELCWQ

SEQ ID NO: 987 - protein, 20 aa, synthetic construct
  REGION 1..20: note = Description of Artificial Sequence: Synthetic peptide
VVCQEWEGVELCWYAGECMQ

SEQ ID NO: 988 - protein, 20 aa, synthetic construct
  REGION 1..20: note = Description of Artificial Sequence: Synthetic peptide
ILCQEFEGVELCWLEESLAE

SEQ ID NO: 989 - protein, 20 aa, synthetic construct
  REGION 1..20: note = Description of Artificial Sequence: Synthetic peptide
KSQVECQDWEGVELCWVVSE

SEQ ID NO: 990 - protein, 20 aa, synthetic construct
  REGION 1..20: note = Description of Artificial Sequence: Synthetic peptide
KITVECQDWDGVELCWPTWI

SEQ ID NO: 991 - protein, 20 aa, synthetic construct
  REGION 1..20: note = Description of Artificial Sequence: Synthetic peptide
RPQIECQEWQGVELCWTREE

SEQ ID NO: 992 - protein, 20 aa, synthetic construct
  REGION 1..20: note = Description of Artificial Sequence: Synthetic peptide
VSCQEWDGVELCWVDGDLAA

SEQ ID NO: 993 - protein, 20 aa, synthetic construct
  REGION 1..20: note = Description of Artificial Sequence: Synthetic peptide
IMCQEWDGVELCWLERDKAN

SEQ ID NO: 994 - protein, 20 aa, synthetic construct
  REGION 1..20: note = Description of Artificial Sequence: Synthetic peptide
GLEIACEDWYGVELCWLRRA

SEQ ID NO: 995 - protein, 24 aa, synthetic construct
  REGION 1..24: note = Description of Artificial Sequence: Synthetic peptide
GYGVLCQEWQGVELCWPVQREAGV

SEQ ID NO: 996 - protein, 20 aa, synthetic construct
  REGION 1..20: note = Description of Artificial Sequence: Synthetic peptide
PYGVVCQDWAGVELCWVENR

SEQ ID NO: 997 - protein, 20 aa, synthetic construct
  REGION 1..20: note = Description of Artificial Sequence: Synthetic peptide
KLTVECQDWDGVELCWVGVE

SEQ ID NO: 998 - protein, 20 aa, synthetic construct
  REGION 1..20: note = Description of Artificial Sequence: Synthetic peptide
INCQTWNGVELCWVDEGLYQ

SEQ ID NO: 999 - protein, 20 aa, synthetic construct
  REGION 1..20: note = Description of Artificial Sequence: Synthetic peptide
VVCQEWEGVELCWVEPPLLP

SEQ ID NO: 1000 - protein, 20 aa, synthetic construct
  REGION 1..20: note = Description of Artificial Sequence: Synthetic peptide
RVQVECEDWNGVELCWPVRV

SEQ ID NO: 1001 - protein, 20 aa, synthetic construct
  REGION 1..20: note = Description of Artificial Sequence: Synthetic peptide
DRQVVCEEWDGVELCWIEES

SEQ ID NO: 1002 - protein, 20 aa, synthetic construct
  REGION 1..20: note = Description of Artificial Sequence: Synthetic peptide
KTTVACQDWGGVELCWVERV

SEQ ID NO: 1003 - protein, 20 aa, synthetic construct
  REGION 1..20: note = Description of Artificial Sequence: Synthetic peptide
RPEVVCQEWEGVELCWISPL

SEQ ID NO: 1004 - protein, 20 aa, synthetic construct
  REGION 1..20: note = Description of Artificial Sequence: Synthetic peptide
RLGVECQEWEGVDLCWISAF

SEQ ID NO: 1005 - protein, 20 aa, synthetic construct
  REGION 1..20: note = Description of Artificial Sequence: Synthetic peptide
KPVVVCEEWQGVELCWLEIQ

SEQ ID NO: 1006 - protein, 20 aa, synthetic construct
  REGION 1..20: note = Description of Artificial Sequence: Synthetic peptide
VVCEVFQGVELCWCENEEFT

SEQ ID NO: 1007 - protein, 20 aa, synthetic construct
  REGION 1..20: note = Description of Artificial Sequence: Synthetic peptide
TDEVSCQEWEGVELCWIERQ

SEQ ID NO: 1008 - protein, 20 aa, synthetic construct
  REGION 1..20: note = Description of Artificial Sequence: Synthetic peptide
PVEVRCQEWEGVELCWVVGI

SEQ ID NO: 1009 - protein, 20 aa, synthetic construct
  REGION 1..20: note = Description of Artificial Sequence: Synthetic peptide
GPEVVCEEFNRVELCWVEYN

SEQ ID NO: 1010 - protein, 20 aa, synthetic construct
  REGION 1..20: note = Description of Artificial Sequence: Synthetic peptide
KYIVECQEWGGVELCWPEMV

SEQ ID NO: 1011 - protein, 20 aa, synthetic construct
  REGION 1..20: note = Description of Artificial Sequence: Synthetic peptide
VTCQEYEGVELCWTVGCAYS

SEQ ID NO: 1012 - protein, 21 aa, synthetic construct
  REGION 1..21: note = Description of Artificial Sequence: Synthetic peptide
VVCQEWEGVELCWQTGPGAHA

SEQ ID NO: 1013 - protein, 20 aa, synthetic construct
  REGION 1..20: note = Description of Artificial Sequence: Synthetic peptide
IVCEEYNGVELCWVETSVKP

SEQ ID NO: 1014 - protein, 20 aa, synthetic construct
  REGION 1..20: note = Description of Artificial Sequence: Synthetic peptide
EQQVVCQEWNGVELCWIEAG

SEQ ID NO: 1015 - protein, 20 aa, synthetic construct
  REGION 1..20: note = Description of Artificial Sequence: Synthetic peptide
QLGVECQNWRGVELCWVSEI

SEQ ID NO: 1016 - protein, 20 aa, synthetic construct
  REGION 1..20: note = Description of Artificial Sequence: Synthetic peptide
TAEVVCQEWDGVELCWIEVL

SEQ ID NO: 1017 - protein, 20 aa, synthetic construct
  REGION 1..20: note = Description of Artificial Sequence: Synthetic peptide
SPSIVCEEWAGVELCWVDYS

SEQ ID NO: 1018 - protein, 20 aa, synthetic construct
  REGION 1..20: note = Description of Artificial Sequence: Synthetic peptide
AVCQDWYGVELCWCMQDILD

SEQ ID NO: 1019 - protein, 20 aa, synthetic construct
  REGION 1..20: note = Description of Artificial Sequence: Synthetic peptide
VECEEWGGVELCWLADEVMW

SEQ ID NO: 1020 - protein, 20 aa, synthetic construct
  REGION 1..20: note = Description of Artificial Sequence: Synthetic peptide
HSTVICQDWDGVELCWIEND

SEQ ID NO: 1021 - protein, 20 aa, synthetic construct
  REGION 1..20: note = Description of Artificial Sequence: Synthetic peptide
KKIVVCQDWGGVELCWTEDD

SEQ ID NO: 1022 - protein, 20 aa, synthetic construct
  REGION 1..20: note = Description of Artificial Sequence: Synthetic peptide
SVEVVCEEWHGVELCWPVFI

SEQ ID NO: 1023 - protein, 20 aa, synthetic construct
  REGION 1..20: note = Description of Artificial Sequence: Synthetic peptide
RWAVSCQDWQGIELCWPEWD

SEQ ID NO: 1024 - protein, 20 aa, synthetic construct
  REGION 1..20: note = Description of Artificial Sequence: Synthetic peptide
RTGVECQDWHGVELCWPVWE

SEQ ID NO: 1025 - protein, 20 aa, synthetic construct
  REGION 1..20: note = Description of Artificial Sequence: Synthetic peptide
GYGVVCEDFRGVELCWLERK

SEQ ID NO: 1026 - protein, 17 aa, synthetic construct
  REGION 1..17: note = Description of Artificial Sequence: Synthetic peptide
RTEVECEDWEGVELCWL

SEQ ID NO: 1027 - protein, 19 aa, synthetic construct
  REGION 1..19: note = Description of Artificial Sequence: Synthetic peptide
ILCEEWQGVELCWLEGGGS

SEQ ID NO: 1028 - protein, 16 aa, synthetic construct
  REGION 1..16: note = Description of Artificial Sequence: Synthetic peptide
VGIECEEWAGVELCWL

SEQ ID NO: 1029-1031 - skipped (3 entries)

SEQ ID NO: 1032 - protein, 15 aa, synthetic construct
  REGION 1..15: note = Description of Artificial Sequence: Synthetic peptide
SLLKCYNASTCASVF

SEQ ID NO: 1033 - skipped

SEQ ID NO: 1034 - protein, 12 aa, synthetic construct
  REGION 1..12: note = Description of Artificial Sequence: Synthetic peptide
CGMAIGDLCMWT

SEQ ID NO: 1035-1041 - skipped (7 entries)

SEQ ID NO: 1042 - protein, 12 aa, synthetic construct
  REGION 1..12: note = Description of Artificial Sequence: Synthetic peptide
RWGDVGDLLMPL

SEQ ID NO: 1043 - skipped

SEQ ID NO: 1044 - protein, 14 aa, synthetic construct
  REGION 1..14: note = Description of Artificial Sequence: Synthetic peptide
RSCYYKRPRLWCSE

SEQ ID NO: 1045-1050 - skipped (6 entries)

SEQ ID NO: 1051 - protein, 16 aa, synthetic construct
  REGION 1..16: note = Description of Artificial Sequence: Synthetic peptide
DCSMWEGVELCWGGRR

SEQ ID NO: 1052 - protein, 20 aa, synthetic construct
  REGION 1..20: note = Description of Artificial Sequence: Synthetic peptide
GGVVCQDWEGVELCWQGGRR

SEQ ID NO: 1053 - protein, 18 aa, synthetic construct
  REGION 1..18: note = Description of Artificial Sequence: Synthetic peptide
GGVMCERWQGVELCWLGG

SEQ ID NO: 1054 - protein, 24 aa, synthetic construct
  REGION 1..24: note = Description of Artificial Sequence: Synthetic peptide
GGRTGVECQDWHGVELCWPVWEGG

SEQ ID NO: 1055 - protein, 20 aa, synthetic construct
  REGION 1..20: note = Description of Artificial Sequence: Synthetic peptide
GGVGIECEEWAGVELCWLGG

SEQ ID NO: 1056 - protein, 24 aa, synthetic construct
  REGION 1..24: note = Description of Artificial Sequence: Synthetic peptide
GGTWNMSELECQDWNGVEICWHGG

SEQ ID NO: 1057 - protein, 21 aa, synthetic construct
  REGION 1..21: note = Description of Artificial Sequence: Synthetic peptide
GGRTEVECEDWEGVELCWLGG

SEQ ID NO: 1058 - protein, 24 aa, synthetic construct
  REGION 1..24: note = Description of Artificial Sequence: Synthetic peptide
GGWSKKAEVVCEEWGGVEFCWIGG

SEQ ID NO: 1059 - protein, 20 aa, synthetic construct
  REGION 1..20: note = Description of Artificial Sequence: Synthetic peptide
WSKKAEVVCEEWGGVEFCWI

SEQ ID NO: 1060 - protein, 20 aa, synthetic construct
  REGION 1..20: note = Description of Artificial Sequence: Synthetic peptide
YSRELYVQCEDWEGVELCWI

SEQ ID NO: 1061-1208 - skipped (148 entries)

SEQ ID NO: 1209 - protein, 18 aa, synthetic construct
  REGION 1..18: note = Description of Artificial Sequence: Synthetic peptide
GWHPCWIAQLGELCDLEG

SEQ ID NO: 1210 - protein, 20 aa, synthetic construct
  REGION 1..20: note = Description of Artificial Sequence: Synthetic peptide
GGWHPCWIAQLGELCDLEGG

SEQ ID NO: 1211 - protein, 22 aa, synthetic construct
  REGION 1..22: note = Description of Artificial Sequence: Synthetic peptide
GGGWHPCWIAQLGELCDLEGGG

SEQ ID NO: 1212 - protein, 284 aa, synthetic construct
  REGION 1..284: note = Description of Artificial Sequence: Synthetic polypeptide
APLERKSSVECPPCPAPPVAGPSVFLFPPKPKDTLMISRTPEVTCVVVDVSHEDPEVQFNWYVDGVEVHNAKTKPREEQFNSTFRVVSVLTVVHQDWLNGKEYKCKVSNKGLPAPIEKTISKTKGQPREPQVYTLPPSREEMTKNQVSLTCLVKGFYPSDIAVEWESNGQPENNYKTTPPMLDSDGSFFLYSKLTVDKSRWQQGNVFSCSVMHEALHNHYTQKSLSLSPGARTGGGGSGGGGSGGWYPCWMAQLGELCDLDGGGGSGGVVCQDWEGVELCWQGG

SEQ ID NO: 1213 - protein, 286 aa, synthetic construct
  REGION 1..286: note = Description of Artificial Sequence: Synthetic polypeptide
AEPKSSDKTHTCPPCPAPEAAGGPSVFLFPPKPKDTLMISRTPEVTCVVVDVSHEDPEVKFNWYVDGVEVHNAKTKPREEQYNSTYRVVSVLTVLHQDWLNGKEYKCKVSNKALGAPIEKTISKAKGQPREPQVYTLPPSREEMTKNQVSLTCLVKGFYPSDIAVEWESNGQPENNYKTTPPVLDSDGSFFLYSKLTVDKSRWQQGNVFSCSVMHEALHNHYTQKSLSLSPGARTGGGGSGGGGSGGWYPCWMAQLGELCDLDGGGGSGGVVCQDWEGVELCWQGG

SEQ ID NO: 1214 - protein, 278 aa, synthetic construct
  REGION 1..278: note = Description of Artificial Sequence: Synthetic polypeptide
APPCPPCPAPEFEGGPSVFLFPPKPKDTLMISRTPEVTCVVVDVSQEDPEVQFNWYVDGVEVHNAKTKPREEQFNSTYRVVSVLTVLHQDWLNGKEYKCKVSNKGLGSSIEKTISKAKGQPREPQVYTLPPSQEEMTKNQVSLTCLVKGFYPSDIAVEWESNGQPENNYKTTPPVLDSDGSFFLYSRLTVDKSRWQEGNVFSCSVMHEALHNHYTQKSLSLSLGARTGGGGSGGGGSGGWYPCWMAQLGELCDLDGGGGSGGVVCQDWEGVELCWQGG

SEQ ID NO: 1215 - protein, 283 aa, synthetic construct
  REGION 1..283: note = Description of Artificial Sequence: Synthetic polypeptide
GGWYPCWMAQLGELCDLDGGGGSGGVVCQDWEGVELCWQGGGGSGGGGSGGGGSRSDKTHTCPPCPAPELLGGPSVFLFPPKPKDTLMISRTPEVTCVVVDVSHEDPEVKFNWYVDGVEVHNAKTKPREEQYNSTYRVVSVLTVLHQDWLNGKEYKCKVSNKALPAPIEKTISKAKGQPREPQVYTLPPSREEMTKNQVSLTCLVKGFYPSDIAVEWESNGQPENNYKTTPPVLDSDGSFFLYSKLTVDKSRWQQGNVFSCSVMHEALHNHYTQKSLSLSPGK

SEQ ID NO: 1216 - protein, 292 aa, synthetic construct
  REGION 1..292: note = Description of Artificial Sequence: Synthetic polypeptide
GITVAEPKSCDKTHTCPPCPAPEAAGGPSVFLFPPKPKDTLMISRTPEVTCVVVDVSHEDPEVKFNWYVDGVEVHNAKTKPREEQYNSTYRVVSVLTVLHQDWLNGKEYKCKVSNKALPAPIEKTISKAKGQPREPQVYTLPPSREEMTKNQVSLWCLVKGFYPSDIAVEWESNGQPENNYKTTPPVLDSDGSFFLYSKLTVDKSRWQQGNVFSCSVMHEALHNHYTQKSLSLSPGGGGGSGGGGSGGGGSGGWYPCWMAQLGELCDLDGGGGSGGVVCQDWEGVELCWQGG

SEQ ID NO: 1217 - protein, 231 aa, synthetic construct
  REGION 1..231: note = Description of Artificial Sequence: Synthetic polypeptide
EPKSCDKTHTCPPCPAPEAAGGPSVFLFPPKPKDTLMISRTPEVTCVVVDVSHEDPEVKFNWYVDGVEVHNAKTKPREEQYNSTYRVVSVLTVLHQDWLNGKEYKCKVSNKALPAPIEKTISKAKGQPREPQVYTLPPSREEMTKNQVSLSCAVKGFYPSDIAVEWESNGQPENNYKTTPPVLDSDGSFFLVSKLTVDKSRWQQGNVFSCSVMHEALHNHYTQKSLSLSPG

SEQ ID NO: 1218 - protein, 218 aa, synthetic construct
  REGION 1..218: note = Description of Artificial Sequence: Synthetic polypeptide
EIVLTQSPATLSLSPGERATLSCRASKGVSTSGYSYLHWYQQKPGQAPRLLIYLASYLESGVPARFSGSGSGTDFTLTISSLEPEDFAVYYCQHSRDLPLTFGGGTKVEIKRTVAAPSVFIFPPSDEQLKSGTASVVCLLNNFYPREAKVQWKVDNALQSGNSQESVTEQDSKDSTYSLSSTLTLSKADYEKHKVYACEVTHQGLSSPVTKSFNRGEC

SEQ ID NO: 1219 - protein, 498 aa, synthetic construct
  REGION 1..498: note = Description of Artificial Sequence: Synthetic polypeptide
QVQLVQSGVEVKKPGASVKVSCKASGYTFTNYYMYWVRQAPGQGLEWMGGINPSNGGTNFNEKFKNRVTLTTDSSTTTAYMELKSLQFDDTAVYYCARRDYRFDMGFDYWGQGTTVTVSSASTKGPSVFPLAPCSRSTSESTAALGCLVKDYFPEPVTVSWNSGALTSGVHTFPAVLQSSGLYSLSSVVTVPSSSLGTKTYTCNVDHKPSNTKVDKRVESKYGPPCPPCPAPEFLGGPSVFLFPPKPKDTLMISRTPEVTCVVVDVSQEDPEVQFNWYVDGVEVHNAKTKPREEQFNSTYRVVSVLTVLHQDWLNGKEYKCKVSNKGLPSSIEKTISKAKGQPREPQVYTLPPSQEEMTKNQVSLTCLVKGFYPSDIAVEWESNGQPENNYKTTPPVLDSDGSFFLYSRLTVDKSRWQEGNVFSCSVMHEALHNHYTQKSLSLSLGAGGGGSGGGGSGGWYPCWMAQLGELCDLDGGGGSGGVVCQDWEGVELCWQGG

SEQ ID NO: 1220 - protein, 214 aa, synthetic construct
  REGION 1..214: note = Description of Artificial Sequence: Synthetic polypeptide
DIQMTQSPSSLSASVGDSITITCRASLSINTFLNWYQQKPGKAPNLLIYAASSLHGGVPSRFSGSGSGTDFTLTIRTLQPEDFATYYCQQSSNTPFTFGPGTVVDFRRTVAAPSVFIFPPSDEQLKSGTASVVCLLNNFYPREAKVQWKVDNALQSGNSQESVTEQDSKDSTYSLSSTLTLSKADYEKHKVYACEVTHQGLSSPVTKSFNRGEC

SEQ ID NO: 1221 - protein, 495 aa, synthetic construct
  REGION 1..495: note = Description of Artificial Sequence: Synthetic polypeptide
EVQLLESGGVLVQPGGSLRLSCAASGFTFSNFGMTWVRQAPGKGLEWVSGISGGGRDTYFADSVKGRFTISRDNSKNTLYLQMNSLKGEDTAVYYCVKWGNIYFDYWGQGTLVTVSSASTKGPSVFPLAPCSRSTSESTAALGCLVKDYFPEPVTVSWNSGALTSGVHTFPAVLQSSGLYSLSSVVTVPSSSLGTKTYTCNVDHKPSNTKVDKRVESKYGPPCPPCPAPEFLGGPSVFLFPPKPKDTLMISRTPEVTCVVVDVSQEDPEVQFNWYVDGVEVHNAKTKPREEQFNSTYRVVSVLTVLHQDWLNGKEYKCKVSNKGLPSSIEKTISKAKGQPREPQVYTLPPSQEEMTKNQVSLTCLVKGFYPSDIAVEWESNGQPENNYKTTPPVLDSDGSFFLYSRLTVDKSRWQEGNVFSCSVMHEALHNHYTQKSLSLSLGAGGGGSGGGGSGGWYPCWMAQLGELCDLDGGGGSGGVVCQDWEGVELCWQGG

SEQ ID NO: 1222 - protein, 213 aa, synthetic construct
  REGION 1..213: note = Description of Artificial Sequence: Synthetic polypeptide
DIQMTQSPSTLSASVGDRVTITCSASSSISYMHWYQQKPGKAPKLLIYTTSNLASGVPARFSGSGSGTEFTLTISSLQPDDFATYYCHQRSTYPLTFGQGTKVEVKRTVAAPSVFIFPPSDEQLKSGTASVVCLLNNFYPREAKVQWKVDNALQSGNSQESVTEQDSKDSTYSLSSTLTLSKADYEKHKVYACEVTHQGLSSPVTKSFNRGEC

SEQ ID NO: 1223 - protein, 497 aa, synthetic construct
  REGION 1..497: note = Description of Artificial Sequence: Synthetic polypeptide
QVQLVQSGAEVKKPGSSVKVSCKASGYTFTSYRMHWVRQAPGQGLEWIGYINPSTGYTEYNQKFKDKATITADESTNTAYMELSSLRSEDTAVYYCARGGGVFDYWGQGTLVTVSSASTKGPSVFPLAPSSKSTSGGTAALGCLVKDYFPEPVTVSWNSGALTSGVHTFPAVLQSSGLYSLSSVVTVPSSSLGTQTYICNVNHKPSNTKVDKKVEPKSCDKTHTCPPCPAPELLGGPSVFLFPPKPKDTLMISRTPEVTCVVVDVSHEDPEVKFNWYVDGVEVHNAKTKPREEQYNSTYRVVSVLTVLHQDWLNGKEYKCKVSNKALPAPIEKTISKAKGQPREPQVYTLPPSRDELTKNQVSLTCLVKGFYPSDIAVEWESNGQPENNYKTTPPVLDSDGSFFLYSKLTVDKSRWQQGNVFSCSVMHEALHNHYTQKSLSLSPGAGGGGSGGGGSGGWYPCWMAQLGELCDLDGGGGSGGVVCQDWEGVELCWQGG

SEQ ID NO: 1224 - protein, 288 aa, synthetic construct
  REGION 1..288: note = Description of Artificial Sequence: Synthetic polypeptide
DKTHTCPPCPAPELLGGPSVFLFPPKPKDTLMISRTPEVTCVVVDVSHEDPEVKFNWYVDGVEVHNAKTKPREEQYASTYRVVSVLTVLHQDWLNGKEYKCKVSNKALPAPIEKTISKAKGQPREPQVYTLPPSRDELTKNQVSLTCLVKGFYPSDIAVEWESNGQPENNYKTTPPVLDSDGSFFLYSKLTVDKSRWQQGNVFSCSVMHEALHNHYTQKSLSLSPGAGSGSGSGSGSGSGSGSGSGSGGWYPCWMAQLGELCDLDGGGGSGGVVCQDWEGVELCWQGG

SEQ ID NO: 1225 - protein, 289 aa, synthetic construct
  REGION 1..289: note = Description of Artificial Sequence: Synthetic polypeptide
ERKSSVECPPCPAPPVAGPSVFLFPPKPKDTLMISRTPEVTCVVVDVSHEDPEVQFNWYVDGVEVHNAKTKPREEQFNSTFRVVSVLTVVHQDWLNGKEYKCKVSNKGLPAPIEKTISKTKGQPREPQVYTLPPSREEMTKNQVSLTCLVKGFYPSDISVEWESNGQPENNYKTTPPMLDSDGSFFLYSKLTVDKSRWQQGNVFSCSVMHEALHNHYTQKSLSLSPGAGSGSGSGSGSGSGSGSGSGSGGWYPCWMAQLGELCDLDGGGGSGGVVCQDWEGVELCWQGG

SEQ ID NO: 1226 - protein, 289 aa, synthetic construct
  REGION 1..289: note = Description of Artificial Sequence: Synthetic polypeptide
ERKSSVECPPCPAPPVAGPSVFLFPPKPKDTLMISRTPEVTCVVVDVSHEDPEVQFNWYVDGVEVHNAKTKPREEQFNSTFRVVSVLTVVHQDWLNGKEYKCKVSNKGLPAPIEKTISKTKGQPREPQVYTLPPSREEMTKNQVSLTCLVKGFYPSDISVEWESNGQPENNYKTTPPMLDSDGSFFLYSKLTVDKSRWQQGNVFSCSVMHEALHNHYTQKSLSLSPGAPAPAPAPAPAPAPAPAPAPAGGWYPCWMAQLGELCDLDGGGGSGGVVCQDWEGVELCWQGG

SEQ ID NO: 1227 - protein, 279 aa, synthetic construct
  REGION 1..279: note = Description of Artificial Sequence: Synthetic polypeptide
APLERKSSVECPPCPAPPVAGPSVFLFPPKPKDTLMISRTPEVTCVVVDVSHEDPEVQFNWYVDGVEVHNAKTKPREEQFNSTFRVVSVLTVVHQDWLNGKEYKCKVSNKGLPAPIEKTISKTKGQPREPQVYTLPPSREEMTKNQVSLTCLVKGFYPSDIAVEWESNGQPENNYKTTPPMLDSDGSFFLYSKLTVDKSRWQQGNVFSCSVMHEALHNHYTQKSLSLSPGARTGGGGSGGWYPCWMAQLGELCDLDGGGGSGGVVCQDWEGVELCWQGG

SEQ ID NO: 1228 - protein, 289 aa, synthetic construct
  REGION 1..289: note = Description of Artificial Sequence: Synthetic polypeptide
APLERKSSVECPPCPAPPVAGPSVFLFPPKPKDTLMISRTPEVTCVVVDVSHEDPEVQFNWYVDGVEVHNAKTKPREEQFNSTFRVVSVLTVVHQDWLNGKEYKCKVSNKGLPAPIEKTISKTKGQPREPQVYTLPPSREEMTKNQVSLTCLVKGFYPSDIAVEWESNGQPENNYKTTPPMLDSDGSFFLYSKLTVDKSRWQQGNVFSCSVMHEALHNHYTQKSLSLSPGARTGGGGSGGGGSGGGGSGGWYPCWMAQLGELCDLDGGGGSGGVVCQDWEGVELCWQGG

SEQ ID NO: 1229 - protein, 294 aa, synthetic construct
  REGION 1..294: note = Description of Artificial Sequence: Synthetic polypeptide
APLERKSSVECPPCPAPPVAGPSVFLFPPKPKDTLMISRTPEVTCVVVDVSHEDPEVQFNWYVDGVEVHNAKTKPREEQFNSTFRVVSVLTVVHQDWLNGKEYKCKVSNKGLPAPIEKTISKTKGQPREPQVYTLPPSREEMTKNQVSLTCLVKGFYPSDIAVEWESNGQPENNYKTTPPMLDSDGSFFLYSKLTVDKSRWQQGNVFSCSVMHEALHNHYTQKSLSLSPGARTGGGGSGGGGSGGGGSGGGGSGGWYPCWMAQLGELCDLDGGGGSGGVVCQDWEGVELCWQGG

SEQ ID NO: 1230 - protein, 276 aa, synthetic construct
  REGION 1..276: note = Description of Artificial Sequence: Synthetic polypeptide
APLERKSSVECPPCPAPPVAGPSVFLFPPKPKDTLMISRTPEVTCVVVDVSHEDPEVQFNWYVDGVEVHNAKTKPREEQFNSTFRVVSVLTVVHQDWLNGKEYKCKVSNKGLPAPIEKTISKTKGQPREPQVYTLPPSREEMTKNQVSLTCLVKGFYPSDIAVEWESNGQPENNYKTTPPMLDSDGSFFLYSKLTVDKSRWQQGNVFSCSVMHEALHNHYTQKSLSLSPGARTGGGGWYPCWMAQLGELCDLDGGGGSGGVVCQDWEGVELCWQGG

SEQ ID NO: 1231 - protein, 279 aa, synthetic construct
  REGION 1..279: note = Description of Artificial Sequence: Synthetic polypeptide
APLERKSSVECPPCPAPPVAGPSVFLFPPKPKDTLMISRTPEVTCVVVDVSHEDPEVQFNWYVDGVEVHNAKTKPREEQFNSTFRVVSVLTVVHQDWLNGKEYKCKVSNKGLPAPIEKTISKTKGQPREPQVYTLPPSREEMTKNQVSLTCLVKGFYPSDIAVEWESNGQPENNYKTTPPMLDSDGSFFLYSKLTVDKSRWQQGNVFSCSVMHEALHNHYTQKSLSLSPGARTGGGGGGGWYPCWMAQLGELCDLDGGGGSGGVVCQDWEGVELCWQGG

SEQ ID NO: 1232 - protein, 294 aa, synthetic construct
  REGION 1..294: note = Description of Artificial Sequence: Synthetic polypeptide
APLERKSSVECPPCPAPPVAGPSVFLFPPKPKDTLMISRTPEVTCVVVDVSHEDPEVQFNWYVDGVEVHNAKTKPREEQFNSTFRVVSVLTVVHQDWLNGKEYKCKVSNKGLPAPIEKTISKTKGQPREPQVYTLPPSREEMTKNQVSLTCLVKGFYPSDIAVEWESNGQPENNYKTTPPMLDSDGSFFLYSKLTVDKSRWQQGNVFSCSVMHEALHNHYTQKSLSLSPGARTGSGSGSGSGSGSGSGSGSGSGGWYPCWMAQLGELCDLDGGGGSGGVVCQDWEGVELCWQGG

SEQ ID NO: 1233 - protein, 284 aa, synthetic construct
  REGION 1..284: note = Description of Artificial Sequence: Synthetic polypeptide
APLERKSSVECPPCPAPPVAGPSVFLFPPKPKDTLMISRTPEVTCVVVDVSHEDPEVQFNWYVDGVEVHNAKTKPREEQFNSTFRVVSVLTVVHQDWLNGKEYKCKVSNKGLPAPIEKTISKTKGQPREPQVYTLPPSREEMTKNQVSLTCLVKGFYPSDIAVEWESNGQPENNYKTTPPMLDSDGSFFLYSKLTVDKSRWQQGNVFSCSVMHEALHNHYTQKSLSLSPGARTPAPAPAPAPAGGWYPCWMAQLGELCDLDGGGGSGGVVCQDWEGVELCWQGG

SEQ ID NO: 1234 - protein, 294 aa, synthetic construct
  REGION 1..294: note = Description of Artificial Sequence: Synthetic polypeptide
APLERKSSVECPPCPAPPVAGPSVFLFPPKPKDTLMISRTPEVTCVVVDVSHEDPEVQFNWYVDGVEVHNAKTKPREEQFNSTFRVVSVLTVVHQDWLNGKEYKCKVSNKGLPAPIEKTISKTKGQPREPQVYTLPPSREEMTKNQVSLTCLVKGFYPSDIAVEWESNGQPENNYKTTPPMLDSDGSFFLYSKLTVDKSRWQQGNVFSCSVMHEALHNHYTQKSLSLSPGARTPAPAPAPAPAPAPAPAPAPAGGWYPCWMAQLGELCDLDGGGGSGGVVCQDWEGVELCWQGG

SEQ ID NO: 1235 - protein, 288 aa, synthetic construct
  REGION 1..288: note = Description of Artificial Sequence: Synthetic polypeptide
APLERKSSVECPPCPAPPVAGPSVFLFPPKPKDTLMISRTPEVTCVVVDVSHEDPEVQFNWYVDGVEVHNAKTKPREEQFNSTFRVVSVLTVVHQDWLNGKEYKCKVSNKGLPAPIEKTISKTKGQPREPQVYTLPPSREEMTKNQVSLTCLVKGFYPSDIAVEWESNGQPENNYKTTPPMLDSDGSFFLYSKLTVDKSRWQQGNVFSCSVMHEALHNHYTQKSLSLSPGARTPAPAPAPAPAPAPAGGWYPCWMAQLGELCDLDGGGGSGGVVCQDWEGVELCWQGG

SEQ ID NO: 1236 - protein, 288 aa, synthetic construct
  REGION 1..288: note = Description of Artificial Sequence: Synthetic polypeptide
APLERKSSVECPPCPAPPVAGPSVFLFPPKPKDTLMISRTPEVTCVVVDVSHEDPEVQFNWYVDGVEVHNAKTKPREEQFNSTFRVVSVLTVVHQDWLNGKEYKCKVSNKGLPAPIEKTISKTKGQPREPQVYTLPPSREEMTKNQVSLTCLVKGFYPSDIAVEWESNGQPENNYKTTPPMLDSDGSFFLYSKLTVDKSRWQQGNVFSCSVMHEALHNHYTQKSLSLSPGARTGGGGSGGGGSGGVQYKKCWMAQLGDLCELDPSGGGGSGGVVCQDWEGVELCWQGG

SEQ ID NO: 1237 - protein, 288 aa, synthetic construct
  REGION 1..288: note = Description of Artificial Sequence: Synthetic polypeptide
APLERKSSVECPPCPAPPVAGPSVFLFPPKPKDTLMISRTPEVTCVVVDVSHEDPEVQFNWYVDGVEVHNAKTKPREEQFNSTFRVVSVLTVVHQDWLNGKEYKCKVSNKGLPAPIEKTISKTKGQPREPQVYTLPPSREEMTKNQVSLTCLVKGFYPSDIAVEWESNGQPENNYKTTPPMLDSDGSFFLYSKLTVDKSRWQQGNVFSCSVMHEALHNHYTQKSLSLSPGARTGGGGSGGGGSGGYPCHMAQLGELCDLWSWGDIGGGGSGGVVCQDWEGVELCWQGG

SEQ ID NO: 1238 - protein, 282 aa, synthetic construct
  REGION 1..282: note = Description of Artificial Sequence: Synthetic polypeptide
APLERKSSVECPPCPAPPVAGPSVFLFPPKPKDTLMISRTPEVTCVVVDVSHEDPEVQFNWYVDGVEVHNAKTKPREEQFNSTFRVVSVLTVVHQDWLNGKEYKCKVSNKGLPAPIEKTISKTKGQPREPQVYTLPPSREEMTKNQVSLTCLVKGFYPSDIAVEWESNGQPENNYKTTPPMLDSDGSFFLYSKLTVDKSRWQQGNVFSCSVMHEALHNHYTQKSLSLSPGARTGGGGSGGGGSGGYPCWMAQLGELCDLGGGGSGGVVCQDWEGVELCWQGG

SEQ ID NO: 1239 - protein, 290 aa, synthetic construct
  REGION 1..290: note = Description of Artificial Sequence: Synthetic polypeptide
APLERKSSVECPPCPAPPVAGPSVFLFPPKPKDTLMISRTPEVTCVVVDVSHEDPEVQFNWYVDGVEVHNAKTKPREEQFNSTFRVVSVLTVVHQDWLNGKEYKCKVSNKGLPAPIEKTISKTKGQPREPQVYTLPPSREEMTKNQVSLTCLVKGFYPSDIAVEWESNGQPENNYKTTPPMLDSDGSFFLYSKLTVDKSRWQQGNVFSCSVMHEALHNHYTQKSLSLSPGARTGGGGSGGGGSGGWYPCWMAQLGELCDLDGGGGSGGWSKKAEVVCEEWGGVEFCWIGG

SEQ ID NO: 1240 - protein, 290 aa, synthetic construct
  REGION 1..290: note = Description of Artificial Sequence: Synthetic polypeptide
APLERKSSVECPPCPAPPVAGPSVFLFPPKPKDTLMISRTPEVTCVVVDVSHEDPEVQFNWYVDGVEVHNAKTKPREEQFNSTFRVVSVLTVVHQDWLNGKEYKCKVSNKGLPAPIEKTISKTKGQPREPQVYTLPPSREEMTKNQVSLTCLVKGFYPSDIAVEWESNGQPENNYKTTPPMLDSDGSFFLYSKLTVDKSRWQQGNVFSCSVMHEALHNHYTQKSLSLSPGARTGGGGSGGGGSGGWYPCWMAQLGELCDLDGGGGSGGRTGVECQDWHGVELCWPVWEGG

SEQ ID NO: 1241 - protein, 286 aa, synthetic construct
  REGION 1..286: note = Description of Artificial Sequence: Synthetic polypeptide
APLERKSSVECPPCPAPPVAGPSVFLFPPKPKDTLMISRTPEVTCVVVDVSHEDPEVQFNWYVDGVEVHNAKTKPREEQFNSTFRVVSVLTVVHQDWLNGKEYKCKVSNKGLPAPIEKTISKTKGQPREPQVYTLPPSREEMTKNQVSLTCLVKGFYPSDIAVEWESNGQPENNYKTTPPMLDSDGSFFLYSKLTVDKSRWQQGNVFSCSVMHEALHNHYTQKSLSLSPGARTGGGGSGGGGSGGWYPCWMAQLGELCDLDGGGGSGGVGIECEEWAGVELCWLGG

SEQ ID NO: 1242 - protein, 290 aa, synthetic construct
  REGION 1..290: note = Description of Artificial Sequence: Synthetic polypeptide
APLERKSSVECPPCPAPPVAGPSVFLFPPKPKDTLMISRTPEVTCVVVDVSHEDPEVQFNWYVDGVEVHNAKTKPREEQFNSTFRVVSVLTVVHQDWLNGKEYKCKVSNKGLPAPIEKTISKTKGQPREPQVYTLPPSREEMTKNQVSLTCLVKGFYPSDIAVEWESNGQPENNYKTTPPMLDSDGSFFLYSKLTVDKSRWQQGNVFSCSVMHEALHNHYTQKSLSLSPGARTGGGGSGGGGSGGWYPCWMAQLGELCDLDGGGGSGGTWNMSELECQDWNGVEICWHGG

SEQ ID NO: 1243 - protein, 287 aa, synthetic construct
  REGION 1..287: note = Description of Artificial Sequence: Synthetic polypeptide
APLERKSSVECPPCPAPPVAGPSVFLFPPKPKDTLMISRTPEVTCVVVDVSHEDPEVQFNWYVDGVEVHNAKTKPREEQFNSTFRVVSVLTVVHQDWLNGKEYKCKVSNKGLPAPIEKTISKTKGQPREPQVYTLPPSREEMTKNQVSLTCLVKGFYPSDIAVEWESNGQPENNYKTTPPMLDSDGSFFLYSKLTVDKSRWQQGNVFSCSVMHEALHNHYTQKSLSLSPGARTGGGGSGGGGSGGWYPCWMAQLGELCDLDGGGGSGGRTEVECEDWEGVELCWLGG

SEQ ID NO: 1244 - protein, 290 aa, synthetic construct
  REGION 1..290: note = Description of Artificial Sequence: Synthetic polypeptide
APLERKSSVECPPCPAPPVAGPSVFLFPPKPKDTLMISRTPEVTCVVVDVSHEDPEVQFNWYVDGVEVHNAKTKPREEQFNSTFRVVSVLTVVHQDWLNGKEYKCKVSNKGLPAPIEKTISKTKGQPREPQVYTLPPSREEMTKNQVSLTCLVKGFYPSDIAVEWESNGQPENNYKTTPPMLDSDGSFFLYSKLTVDKSRWQQGNVFSCSVMHEALHNHYTQKSLSLSPGARTGGGGSGGGGSGGFYPCWTALLGELCDLEPGPPAMGGGGSGGVVCQDWEGVELCWQGG

SEQ ID NO: 1245 - protein, 290 aa, synthetic construct
  REGION 1..290: note = Description of Artificial Sequence: Synthetic polypeptide
APLERKSSVECPPCPAPPVAGPSVFLFPPKPKDTLMISRTPEVTCVVVDVSHEDPEVQFNWYVDGVEVHNAKTKPREEQFNSTFRVVSVLTVVHQDWLNGKEYKCKVSNKGLPAPIEKTISKTKGQPREPQVYTLPPSREEMTKNQVSLTCLVKGFYPSDIAVEWESNGQPENNYKTTPPMLDSDGSFFLYSKLTVDKSRWQQGNVFSCSVMHEALHNHYTQKSLSLSPGARTGGGGSGGGGSGGWGTTWRWYPCWMAQLGELCDLEGGGGSGGVVCQDWEGVELCWQGG

SEQ ID NO: 1246 - protein, 290 aa, synthetic construct
  REGION 1..290: note = Description of Artificial Sequence: Synthetic polypeptide
APLERKSSVECPPCPAPPVAGPSVFLFPPKPKDTLMISRTPEVTCVVVDVSHEDPEVQFNWYVDGVEVHNAKTKPREEQFNSTFRVVSVLTVVHQDWLNGKEYKCKVSNKGLPAPIEKTISKTKGQPREPQVYTLPPSREEMTKNQVSLTCLVKGFYPSDIAVEWESNGQPENNYKTTPPMLDSDGSFFLYSKLTVDKSRWQQGNVFSCSVMHEALHNHYTQKSLSLSPGARTGGGGSGGGGSGGDVLGDRWYPCWIAKLGELCDLDGGGGSGGVVCQDWEGVELCWQGG

SEQ ID NO: 1247 - protein, 284 aa, synthetic construct
  REGION 1..284: note = Description of Artificial Sequence: Synthetic polypeptide
APLERKSSVECPPCPAPPVAGPSVFLFPPKPKDTLMISRTPEVTCVVVDVSHEDPEVQFNWYVDGVEVHNAKTKPREEQFNSTFRVVSVLTVVHQDWLNGKEYKCKVSNKGLPAPIEKTISKTKGQPREPQVYTLPPSREEMTKNQVSLTCLVKGFYPSDIAVEWESNGQPENNYKTTPPMLDSDGSFFLYSKLTVDKSRWQQGNVFSCSVMHEALHNHYTQKSLSLSPGARTGGGGSGGGGSGGWYPCWIAQLGELCDLDGGGGSGGVVCQDWEGVELCWQGG

SEQ ID NO: 1248 - protein, 284 aa, synthetic construct
  REGION 1..284: note = Description of Artificial Sequence: Synthetic polypeptide
APLERKSSVECPPCPAPPVAGPSVFLFPPKPKDTLMISRTPEVTCVVVDVSHEDPEVQFNWYVDGVEVHNAKTKPREEQFNSTFRVVSVLTVVHQDWLNGKEYKCKVSNKGLPAPIEKTISKTKGQPREPQVYTLPPSREEMTKNQVSLTCLVKGFYPSDIAVEWESNGQPENNYKTTPPMLDSDGSFFLYSKLTVDKSRWQQGNVFSCSVMHEALHNHYTQKSLSLSPGARTGGGGSGGGGSGGWYPCWLAKLGELCDLDGGGGSGGVVCQDWEGVELCWQGG

SEQ ID NO: 1249 - protein, 290 aa, synthetic construct
  REGION 1..290: note = Description of Artificial Sequence: Synthetic polypeptide
APLERKSSVECPPCPAPPVAGPSVFLFPPKPKDTLMISRTPEVTCVVVDVSHEDPEVQFNWYVDGVEVHNAKTKPREEQFNSTFRVVSVLTVVHQDWLNGKEYKCKVSNKGLPAPIEKTISKTKGQPREPQVYTLPPSREEMTKNQVSLTCLVKGFYPSDIAVEWESNGQPENNYKTTPPMLDSDGSFFLYSKLTVDKSRWQQGNVFSCSVMHEALHNHYTQKSLSLSPGARTGGGGSGGGGSGGWYPCWMAQLGDLCDLEKPVTERGGGGSGGVVCQDWEGVELCWQGG

SEQ ID NO: 1250 - protein, 290 aa, synthetic construct
  REGION 1..290: note = Description of Artificial Sequence: Synthetic polypeptide
APLERKSSVECPPCPAPPVAGPSVFLFPPKPKDTLMISRTPEVTCVVVDVSHEDPEVQFNWYVDGVEVHNAKTKPREEQFNSTFRVVSVLTVVHQDWLNGKEYKCKVSNKGLPAPIEKTISKTKGQPREPQVYTLPPSREEMTKNQVSLTCLVKGFYPSDIAVEWESNGQPENNYKTTPPMLDSDGSFFLYSKLTVDKSRWQQGNVFSCSVMHEALHNHYTQKSLSLSPGARTGGGGSGGGGSGGWRRWYPCWVAQVGELCDLEIEAGGGGSGGVVCQDWEGVELCWQGG

SEQ ID NO: 1251 - protein, 290 aa, synthetic construct
  REGION 1..290: note = Description of Artificial Sequence: Synthetic polypeptide
APLERKSSVECPPCPAPPVAGPSVFLFPPKPKDTLMISRTPEVTCVVVDVSHEDPEVQFNWYVDGVEVHNAKTKPREEQFNSTFRVVSVLTVVHQDWLNGKEYKCKVSNKGLPAPIEKTISKTKGQPREPQVYTLPPSREEMTKNQVSLTCLVKGFYPSDIAVEWESNGQPENNYKTTPPMLDSDGSFFLYSKLTVDKSRWQQGNVFSCSVMHEALHNHYTQKSLSLSPGARTGGGGSGGGGSGGRQRWYPCWMARLGELCDLDEPTGGGGSGGVVCQDWEGVELCWQGG

SEQ ID NO: 1252 - protein, 648 aa, synthetic construct
  REGION 1..648: note = Description of Artificial Sequence: Synthetic polypeptide
GGHHHHHHGGDAHKSEVAHRFKDLGEENFKALVLIAFAQYLQQCPFEDHVKLVNEVTEFAKTCVADESAENCDKSLHTLFGDKLCTVATLRETYGEMADCCAKQEPERNECFLQHKDDNPNLPRLVRPEVDVMCTAFHDNEETFLKKYLYEIARRHPYFYAPELLFFAKRYKAAFTECCQAADKAACLLPKLDELRDEGKASSAKQRLKCASLQKFGERAFKAWAVARLSQRFPKAEFAEVSKLVTDLTKVHTECCHGDLLECADDRADLAKYICENQDSISSKLKECCEKPLLEKSHCIAEVENDEMPADLPSLAADFVESKDVCKNYAEAKDVFLGMFLYEYARRHPDYSVVLLLRLAKTYETTLEKCCAAADPHECYAKVFDEFKPLVEEPQNLIKQNCELFEQLGEYKFQNALLVRYTKKVPQVSTPTLVEVSRNLGKVGSKCCKHPEAKRMPCAEDYLSVVLNQLCVLHEKTPVSDRVTKCCTESLVNRRPCFSALEVDETYVPKEFNAETFTFHADICTLSEKERQIKKQTALVELVKHKPKATKEQLKAVMDDFAAFVEKCCKADDKETCFAEEGKKLVAASQAALGLRTGGGGSGGGGSGGWYPCWMAQLGELCDLDGGGGSGGVVCQDWEGVELCWQGG

SEQ ID NO: 1253-1262 - skipped (10 entries)

SEQ ID NO: 1263 - protein, 41 aa, synthetic construct
  REGION 1..41: note = Description of Artificial Sequence: Synthetic polypeptide
GGWYPCWMAQLGELCDLDGGGGSGGVVCQDWEGVELCWQGG

SEQ ID NO: 1264 - protein, 37 aa, synthetic construct
  REGION 1..37: note = Description of Artificial Sequence: Synthetic polypeptide
WYPCWMAQLGELCDLDGGGGSGGVVCQDWEGVELCWQ

SEQ ID NO: 1265 - protein, 54 aa, synthetic construct
  REGION 1..54: note = Description of Artificial Sequence: Synthetic polypeptide
  MOD_RES 19..38: note = Any amino acid
  REGION 19..38: note = MISC_FEATURE - This region may encompass 1-20 residues
WYPCWMAQLGELCDLDGGXXXXXXXXXXXXXXXXXXXXGGVVCQDWEGVELCWQ

SEQ ID NO: 1266 - protein, 60 aa, synthetic construct
  REGION 1..60: note = Description of Artificial Sequence: Synthetic polypeptide
  MOD_RES 17..46: note = Any amino acid
  REGION 17..46: note = MISC_FEATURE - This region may encompass 1-30 residues
WYPCWMAQLGELCDLDXXXXXXXXXXXXXXXXXXXXXXXXXXXXXXVVCQDWEGVELCWQ

SEQ ID NO: 1267 - protein, 39 aa, synthetic construct
  REGION 1..39: note = Description of Artificial Sequence: Synthetic polypeptide
GWYPCWMAQLGELCDLDGGGGSGGVVCQDWEGVELCWQG

SEQ ID NO: 1268 - protein, 40 aa, synthetic construct
  REGION 1..40: note = Description of Artificial Sequence: Synthetic polypeptide
GGWYPCWMAQLGELCDLDGGGGSGGVVCQDWEGVELCWQG

SEQ ID NO: 1269 - protein, 40 aa, synthetic construct
  REGION 1..40: note = Description of Artificial Sequence: Synthetic polypeptide
GWYPCWMAQLGELCDLDGGGGSGGVVCQDWEGVELCWQGG

SEQ ID NO: 1270 - protein, 60 aa, synthetic construct
  REGION 1..60: note = Description of Artificial Sequence: Synthetic polypeptide
  MOD_RES 1..5: note = Any amino acid
  REGION 1..5: note = MISC_EFATURE - This region may encompass 1-5 residues or be absent in its entirety
  MOD_RES 22..41: note = Any amino acid
  REGION 22..41: note = MISC_FEATURE - This region may encompass 1-20 residues
  MOD_RES 56..60: note = Any amino acid
  REGION 56..60: note = MISC_EFATURE - This region may encompass 1-5 residues or be absent in its entirety
XXXXXWYPCWMAQLGELCDLDXXXXXXXXXXXXXXXXXXXXVVCQDWEGVELCWQXXXXX

SEQ ID NO: 1271-1600 - skipped (330 entries)

SEQ ID NO: 1601 - protein, 16 aa, synthetic construct
  REGION 1..16: note = Description of Artificial Sequence: Synthetic peptide
GGDCSMWEGVELCWGG

SEQ ID NO: 1602 - protein, 18 aa, synthetic construct
  REGION 1..18: note = Description of Artificial Sequence: Synthetic peptide
GGVMCERWQGVELCWLGG

SEQ ID NO: 1603 - protein, 20 aa, synthetic construct
  REGION 1..20: note = Description of Artificial Sequence: Synthetic peptide
GGVGIECEEWAGVELCWLGG

SEQ ID NO: 1604 - protein, 24 aa, synthetic construct
  REGION 1..24: note = Description of Artificial Sequence: Synthetic peptide
GGTWNMSELECQDWNGVEICWHGG

SEQ ID NO: 1605 - protein, 21 aa, synthetic construct
  REGION 1..21: note = Description of Artificial Sequence: Synthetic peptide
GGRTEVECEDWEGVELCWLGG

SEQ ID NO: 1606 - protein, 24 aa, synthetic construct
  REGION 1..24: note = Description of Artificial Sequence: Synthetic peptide
GGRTGVECQDWHGVELCWPVWEGG

SEQ ID NO: 1607 - protein, 18 aa, synthetic construct
  REGION 1..18: note = Description of Artificial Sequence: Synthetic peptide
  MOD_RES 12: note = Abu
GGVVCQDWEGVXLCWQGG

SEQ ID NO: 1608 - protein, 18 aa, synthetic construct
  REGION 1..18: note = Description of Artificial Sequence: Synthetic peptide
  MOD_RES 12: note = Alb
GGVVCQDWEGVXLCWQGG

SEQ ID NO: 1609 - protein, 19 aa, synthetic construct
  REGION 1..19: note = Description of Artificial Sequence: Synthetic peptide
GGVVCQDWEGVDALCWQGG

SEQ ID NO: 1610 - protein, 18 aa, synthetic construct
  REGION 1..18: note = Description of Artificial Sequence: Synthetic peptide
GGVVCQDWEGVSLCWQGG

SEQ ID NO: 1611 - protein, 18 aa, synthetic construct
  REGION 1..18: note = Description of Artificial Sequence: Synthetic peptide
GGVVCQDWEGVGLCWQGG

SEQ ID NO: 1612 - protein, 19 aa, synthetic construct
  REGION 1..19: note = Description of Artificial Sequence: Synthetic peptide
GGVVCQDWEGVELCWQPPA

SEQ ID NO: 1613 - protein, 20 aa, synthetic construct
  REGION 1..20: note = Description of Artificial Sequence: Synthetic peptide
GGVVCQDWEGVELCWQGPPA

SEQ ID NO: 1614-2579 - skipped (966 entries)

SEQ ID NO: 2580 - protein, 21 aa, synthetic construct
  REGION 1..21: note = Description of Artificial Sequence: Synthetic peptide
VRAWYPCWIARLGELCDLEVD

SEQ ID NO: 2581 - protein, 16 aa, synthetic construct
  REGION 1..16: note = Description of Artificial Sequence: Synthetic peptide
WFPCWMAQLGEVCDLD

SEQ ID NO: 2582 - protein, 16 aa, synthetic construct
  REGION 1..16: note = Description of Artificial Sequence: Synthetic peptide
WYPCHMAKLRELCDLD

SEQ ID NO: 2583 - protein, 16 aa, synthetic construct
  REGION 1..16: note = Description of Artificial Sequence: Synthetic peptide
SLPCWMAQLGDLCELH

SEQ ID NO: 2584 - protein, 16 aa, synthetic construct
  REGION 1..16: note = Description of Artificial Sequence: Synthetic peptide
SNPCWMAQLWELCDLE

SEQ ID NO: 2585 - protein, 16 aa, synthetic construct
  REGION 1..16: note = Description of Artificial Sequence: Synthetic peptide
YKPCWIAQLGELCELE

SEQ ID NO: 2586 - protein, 16 aa, synthetic construct
  REGION 1..16: note = Description of Artificial Sequence: Synthetic peptide
WQPCWMAQLGELCDLE

SEQ ID NO: 2587 - protein, 16 aa, synthetic construct
  REGION 1..16: note = Description of Artificial Sequence: Synthetic peptide
WKPCWLAQLGDLCEME

SEQ ID NO: 2588 - protein, 16 aa, synthetic construct
  REGION 1..16: note = Description of Artificial Sequence: Synthetic peptide
WLPCWMAKLGDLCELE

SEQ ID NO: 2589 - protein, 16 aa, synthetic construct
  REGION 1..16: note = Description of Artificial Sequence: Synthetic peptide
WLPCWMAQLGELCVME

SEQ ID NO: 2590 - protein, 16 aa, synthetic construct
  REGION 1..16: note = Description of Artificial Sequence: Synthetic peptide
LHPCWMAQLGELCDLE

SEQ ID NO: 2591 - protein, 16 aa, synthetic construct
  REGION 1..16: note = Description of Artificial Sequence: Synthetic peptide
SLPCWMAQLGELCDLV

SEQ ID NO: 2592 - protein, 16 aa, synthetic construct
  REGION 1..16: note = Description of Artificial Sequence: Synthetic peptide
WKPCWMAGLGELCELD

SEQ ID NO: 2593 - protein, 16 aa, synthetic construct
  REGION 1..16: note = Description of Artificial Sequence: Synthetic peptide
WWPCSSAELGEICDFD

SEQ ID NO: 2594 - protein, 16 aa, synthetic construct
  REGION 1..16: note = Description of Artificial Sequence: Synthetic peptide
WQPCWRAKLGELCDLE

SEQ ID NO: 2595 - protein, 16 aa, synthetic construct
  REGION 1..16: note = Description of Artificial Sequence: Synthetic peptide
WSPCWIATLGELCDLD

SEQ ID NO: 2596 - protein, 16 aa, synthetic construct
  REGION 1..16: note = Description of Artificial Sequence: Synthetic peptide
WNPCWIAQLGDLCDMV

SEQ ID NO: 2597 - protein, 16 aa, synthetic construct
  REGION 1..16: note = Description of Artificial Sequence: Synthetic peptide
WLPCWLAHLGDICDLQ

SEQ ID NO: 2598 - protein, 22 aa, synthetic construct
  REGION 1..22: note = Description of Artificial Sequence: Synthetic peptide
WLSPPSYLPCWMAQLGELCDLV

SEQ ID NO: 2599 - protein, 22 aa, synthetic construct
  REGION 1..22: note = Description of Artificial Sequence: Synthetic peptide
WDVHAIRNPCWLAKLGDLCDLD

SEQ ID NO: 2600 - protein, 22 aa, synthetic construct
  REGION 1..22: note = Description of Artificial Sequence: Synthetic peptide
GAGVLHRWPCWMAKLGDLCDLD

SEQ ID NO: 2601 - protein, 22 aa, synthetic construct
  REGION 1..22: note = Description of Artificial Sequence: Synthetic peptide
DTGRDGWKPCWMALLGELCELE

SEQ ID NO: 2602 - protein, 22 aa, synthetic construct
  REGION 1..22: note = Description of Artificial Sequence: Synthetic peptide
EQGMLGYFPCWKALLGDVCDLD

SEQ ID NO: 2603 - protein, 22 aa, synthetic construct
  REGION 1..22: note = Description of Artificial Sequence: Synthetic peptide
WRVTASLQPCWMAQLGELCDLN

SEQ ID NO: 2604 - protein, 22 aa, synthetic construct
  REGION 1..22: note = Description of Artificial Sequence: Synthetic peptide
GQVVETSLPCWEAQLGELCVLD

SEQ ID NO: 2605 - protein, 22 aa, synthetic construct
  REGION 1..22: note = Description of Artificial Sequence: Synthetic peptide
TVGQFEWYPCSTAQLGELCDLD

SEQ ID NO: 2606 - protein, 22 aa, synthetic construct
  REGION 1..22: note = Description of Artificial Sequence: Synthetic peptide
ALVGGTFYPCYVAHLGELCDIE

SEQ ID NO: 2607 - protein, 22 aa, synthetic construct
  REGION 1..22: note = Description of Artificial Sequence: Synthetic peptide
IDRADGWKPCWIAQVGELCVLE

SEQ ID NO: 2608 - protein, 22 aa, synthetic construct
  REGION 1..22: note = Description of Artificial Sequence: Synthetic peptide
YRRERVEFPCWLAQLGELCDKE

SEQ ID NO: 2609 - protein, 22 aa, synthetic construct
  REGION 1..22: note = Description of Artificial Sequence: Synthetic peptide
AVSHGNWLPCYIAQLGELCDLD

SEQ ID NO: 2610 - protein, 22 aa, synthetic construct
  REGION 1..22: note = Description of Artificial Sequence: Synthetic peptide
IPKGESWFPCWMAAMGELCDLE

SEQ ID NO: 2611 - protein, 22 aa, synthetic construct
  REGION 1..22: note = Description of Artificial Sequence: Synthetic peptide
WYPCWIAQLGEVCDLEKQTGSV

SEQ ID NO: 2612 - protein, 22 aa, synthetic construct
  REGION 1..22: note = Description of Artificial Sequence: Synthetic peptide
WYPCWMAHLGDVCDLESFGQTE

SEQ ID NO: 2613 - protein, 22 aa, synthetic construct
  REGION 1..22: note = Description of Artificial Sequence: Synthetic peptide
YKPCQMAQLGELCDLDVDNKAE

SEQ ID NO: 2614 - protein, 22 aa, synthetic construct
  REGION 1..22: note = Description of Artificial Sequence: Synthetic peptide
FKPCWIANLGELCDMDDERSSE

SEQ ID NO: 2615 - protein, 22 aa, synthetic construct
  REGION 1..22: note = Description of Artificial Sequence: Synthetic peptide
WKPCWMARLGELCDIEDTKVNA

SEQ ID NO: 2616 - protein, 22 aa, synthetic construct
  REGION 1..22: note = Description of Artificial Sequence: Synthetic peptide
SLPCWIARLGELCDLDGYDGEE

SEQ ID NO: 2617 - protein, 22 aa, synthetic construct
  REGION 1..22: note = Description of Artificial Sequence: Synthetic peptide
FYPCWKARLGELCELEELRGYY

SEQ ID NO: 2618 - protein, 22 aa, synthetic construct
  REGION 1..22: note = Description of Artificial Sequence: Synthetic peptide
WKPCWIADLGELCDLAPAWHEY

SEQ ID NO: 2619 - protein, 22 aa, synthetic construct
  REGION 1..22: note = Description of Artificial Sequence: Synthetic peptide
RLPCWRAQLGDLCELDWGLDMG

SEQ ID NO: 2620 - protein, 22 aa, synthetic construct
  REGION 1..22: note = Description of Artificial Sequence: Synthetic peptide
SKPCWMAQLGELCDLDVWNLQM

SEQ ID NO: 2621 - protein, 22 aa, synthetic construct
  REGION 1..22: note = Description of Artificial Sequence: Synthetic peptide
GYPCWLAQLGDYCDLDAGAPSW

SEQ ID NO: 2622 - protein, 22 aa, synthetic construct
  REGION 1..22: note = Description of Artificial Sequence: Synthetic peptide
SWPCWMAQLGDLCDLDGSAGAS

SEQ ID NO: 2623 - protein, 22 aa, synthetic construct
  REGION 1..22: note = Description of Artificial Sequence: Synthetic peptide
WKPCWLAQLGELCDLERPSTTS

SEQ ID NO: 2624 - protein, 22 aa, synthetic construct
  REGION 1..22: note = Description of Artificial Sequence: Synthetic peptide
WYSCGKAQLGELCDLDVESQPG

SEQ ID NO: 2625 - protein, 22 aa, synthetic construct
  REGION 1..22: note = Description of Artificial Sequence: Synthetic peptide
YVPCYMARLGELCELEANRPGQ

SEQ ID NO: 2626 - protein, 22 aa, synthetic construct
  REGION 1..22: note = Description of Artificial Sequence: Synthetic peptide
SKPCWLAQLGDLCDFDWTAADH

SEQ ID NO: 2627 - protein, 22 aa, synthetic construct
  REGION 1..22: note = Description of Artificial Sequence: Synthetic peptide
WFPCWMAQLGDLCELEPDSVPA

SEQ ID NO: 2628 - protein, 22 aa, synthetic construct
  REGION 1..22: note = Description of Artificial Sequence: Synthetic peptide
WTPCWIAHLGDLCDLEPQDDTD

SEQ ID NO: 2629 - protein, 22 aa, synthetic construct
  REGION 1..22: note = Description of Artificial Sequence: Synthetic peptide
WKPCFIASLGELCDLDQGSVEV

SEQ ID NO: 2630 - protein, 22 aa, synthetic construct
  REGION 1..22: note = Description of Artificial Sequence: Synthetic peptide
WKPCWMAALGELCDLERSVGKV

SEQ ID NO: 2631 - protein, 22 aa, synthetic construct
  REGION 1..22: note = Description of Artificial Sequence: Synthetic peptide
WKPCWRAQLGELCDLELGPSER

SEQ ID NO: 2632 - protein, 22 aa, synthetic construct
  REGION 1..22: note = Description of Artificial Sequence: Synthetic peptide
FFPCWMGQLGDLCDLEVRSMQK

SEQ ID NO: 2633 - protein, 22 aa, synthetic construct
  REGION 1..22: note = Description of Artificial Sequence: Synthetic peptide
YWPCSMASLGELCDLEWQGRLP

SEQ ID NO: 2634 - protein, 22 aa, synthetic construct
  REGION 1..22: note = Description of Artificial Sequence: Synthetic peptide
WYPCYMASLGELCDLQSSISPR

SEQ ID NO: 2635 - protein, 22 aa, synthetic construct
  REGION 1..22: note = Description of Artificial Sequence: Synthetic peptide
WYPCWMAQLGELCDHEWPSYGA

SEQ ID NO: 2636 - protein, 22 aa, synthetic construct
  REGION 1..22: note = Description of Artificial Sequence: Synthetic peptide
MGSWLPCWMAQLGDLCDVEGGM

SEQ ID NO: 2637 - protein, 22 aa, synthetic construct
  REGION 1..22: note = Description of Artificial Sequence: Synthetic peptide
QKGFLPCWRAQLGQLCDMESQY

SEQ ID NO: 2638 - protein, 22 aa, synthetic construct
  REGION 1..22: note = Description of Artificial Sequence: Synthetic peptide
GSGWQPCWMADLGELCDLDNEK

SEQ ID NO: 2639 - protein, 22 aa, synthetic construct
  REGION 1..22: note = Description of Artificial Sequence: Synthetic peptide
WRRWYPCWMAQLGELCDLDQWT

SEQ ID NO: 2640 - protein, 22 aa, synthetic construct
  REGION 1..22: note = Description of Artificial Sequence: Synthetic peptide
RRSWYPCRIAQLGELCDLDPRV

SEQ ID NO: 2641 - protein, 22 aa, synthetic construct
  REGION 1..22: note = Description of Artificial Sequence: Synthetic peptide
AYRIYPCWKAQLGELCDLDNAD

SEQ ID NO: 2642 - protein, 22 aa, synthetic construct
  REGION 1..22: note = Description of Artificial Sequence: Synthetic peptide
QRNSFPCWLAQLGDLCDLGDWA

SEQ ID NO: 2643 - protein, 22 aa, synthetic construct
  REGION 1..22: note = Description of Artificial Sequence: Synthetic peptide
QPAWLPCWLAQLGELCDLGTGA

SEQ ID NO: 2644 - protein, 22 aa, synthetic construct
  REGION 1..22: note = Description of Artificial Sequence: Synthetic peptide
SRFWQPCWMAQLGELCHLDPQM

SEQ ID NO: 2645 - protein, 22 aa, synthetic construct
  REGION 1..22: note = Description of Artificial Sequence: Synthetic peptide
YLNFNPCWTAQLGELCDLASGE

SEQ ID NO: 2646 - protein, 22 aa, synthetic construct
  REGION 1..22: note = Description of Artificial Sequence: Synthetic peptide
STGWYPCWIAEFGELCDLVKPH

SEQ ID NO: 2647 - protein, 22 aa, synthetic construct
  REGION 1..22: note = Description of Artificial Sequence: Synthetic peptide
AHWSQPCWTAQLGELCDLDMGD

SEQ ID NO: 2648 - protein, 22 aa, synthetic construct
  REGION 1..22: note = Description of Artificial Sequence: Synthetic peptide
HPVRYPCWVAQLGELCDLENGN

SEQ ID NO: 2649 - protein, 22 aa, synthetic construct
  REGION 1..22: note = Description of Artificial Sequence: Synthetic peptide
QTGSYPCWIAHLGELCDLEGSA

SEQ ID NO: 2650 - protein, 21 aa, synthetic construct
  REGION 1..21: note = Description of Artificial Sequence: Synthetic peptide
TGWWYPCWMAQLGELCDLQQT

SEQ ID NO: 2651 - protein, 19 aa, synthetic construct
  REGION 1..19: note = Description of Artificial Sequence: Synthetic peptide
DLWQPCWMARLGELCDLKG

SEQ ID NO: 2652 - protein, 20 aa, synthetic construct
  REGION 1..20: note = Description of Artificial Sequence: Synthetic peptide
MGTGWQNYCRYAQLGELCLL

SEQ ID NO: 2653 - protein, 16 aa, synthetic construct
  REGION 1..16: note = Description of Artificial Sequence: Synthetic peptide
WYPCGVAQPGDLCDLE

SEQ ID NO: 2654 - protein, 22 aa, synthetic construct
  REGION 1..22: note = Description of Artificial Sequence: Synthetic peptide
MLGEWLCEMDQLGYLCYLDHGD

SEQ ID NO: 2655 - protein, 20 aa, synthetic construct
  REGION 1..20: note = Description of Artificial Sequence: Synthetic peptide
WDGWECGMDHDGWVCEFWGE

SEQ ID NO: 2656-2666 - skipped (11 entries)

SEQ ID NO: 2667 - protein, 22 aa, synthetic construct
  REGION 1..22: note = Description of Artificial Sequence: Synthetic peptide
WYPCWIAQLGELCDLDAKGQRR

SEQ ID NO: 2668 - protein, 22 aa, synthetic construct
  REGION 1..22: note = Description of Artificial Sequence: Synthetic peptide
TNNFYPCWLAKLGDLCDFDDLN

SEQ ID NO: 2669 - protein, 22 aa, synthetic construct
  REGION 1..22: note = Description of Artificial Sequence: Synthetic peptide
WYPCWIARVGELCDLEEGPVNR

SEQ ID NO: 2670 - protein, 21 aa, synthetic construct
  REGION 1..21: note = Description of Artificial Sequence: Synthetic peptide
AVEFYPCWLARIGELCDLVEP

SEQ ID NO: 2671 - protein, 16 aa, synthetic construct
  REGION 1..16: note = Description of Artificial Sequence: Synthetic peptide
WYPCWIAHLGELCDLE

SEQ ID NO: 2672 - protein, 16 aa, synthetic construct
  REGION 1..16: note = Description of Artificial Sequence: Synthetic peptide
WYPCWIARVGELCDME

SEQ ID NO: 2673 - protein, 21 aa, synthetic construct
  REGION 1..21: note = Description of Artificial Sequence: Synthetic peptide
RREWYPCWIAQVGELCDLPLI

SEQ ID NO: 2674 - protein, 22 aa, synthetic construct
  REGION 1..22: note = Description of Artificial Sequence: Synthetic peptide
RWPWYPCEIARIGELCDLEQAN

SEQ ID NO: 2675 - protein, 22 aa, synthetic construct
  REGION 1..22: note = Description of Artificial Sequence: Synthetic peptide
FGAFYPCWKAQLGELCDLEPVT

SEQ ID NO: 2676 - protein, 22 aa, synthetic construct
  REGION 1..22: note = Description of Artificial Sequence: Synthetic peptide
HGRWFPCWMAQVGDLCDLEHSN

SEQ ID NO: 2677 - protein, 22 aa, synthetic construct
  REGION 1..22: note = Description of Artificial Sequence: Synthetic peptide
WYPCWLAKLGELCDLDRAEALP

SEQ ID NO: 2678 - protein, 20 aa, synthetic construct
  REGION 1..20: note = Description of Artificial Sequence: Synthetic peptide
VWFPCWFAQLGDLCDLDQDP

SEQ ID NO: 2679 - protein, 22 aa, synthetic construct
  REGION 1..22: note = Description of Artificial Sequence: Synthetic peptide
ETLGSVWYPCWIASIGELCDLD

SEQ ID NO: 2680 - protein, 22 aa, synthetic construct
  REGION 1..22: note = Description of Artificial Sequence: Synthetic peptide
WYSCWIAQLGELCDLDDMGDRV

SEQ ID NO: 2681 - protein, 16 aa, synthetic construct
  REGION 1..16: note = Description of Artificial Sequence: Synthetic peptide
WFPCWLAQLGELCDKE

SEQ ID NO: 2682 - protein, 16 aa, synthetic construct
  REGION 1..16: note = Description of Artificial Sequence: Synthetic peptide
WYPCWIAQLGELCDLV

SEQ ID NO: 2683 - protein, 22 aa, synthetic construct
  REGION 1..22: note = Description of Artificial Sequence: Synthetic peptide
SHLWFPCWMAQLGELCDLEGGP

SEQ ID NO: 2684 - protein, 21 aa, synthetic construct
  REGION 1..21: note = Description of Artificial Sequence: Synthetic peptide
RRWLPCWMAHVGELCDLELGN

SEQ ID NO: 2685 - protein, 21 aa, synthetic construct
  REGION 1..21: note = Description of Artificial Sequence: Synthetic peptide
YWCWFARVGELCDLDDGGVPS

SEQ ID NO: 2686 - protein, 16 aa, synthetic construct
  REGION 1..16: note = Description of Artificial Sequence: Synthetic peptide
WYSCWIAQIGELCDLE

SEQ ID NO: 2687 - protein, 22 aa, synthetic construct
  REGION 1..22: note = Description of Artificial Sequence: Synthetic peptide
MNPVGTFYPCWIAKLGELCDLQ

SEQ ID NO: 2688 - protein, 22 aa, synthetic construct
  REGION 1..22: note = Description of Artificial Sequence: Synthetic peptide
HGGVIGWYPCWMAKVGELCDLD

SEQ ID NO: 2689 - protein, 22 aa, synthetic construct
  REGION 1..22: note = Description of Artificial Sequence: Synthetic peptide
WYPCSIALLGELCDLESVHEKS

SEQ ID NO: 2690 - protein, 22 aa, synthetic construct
  REGION 1..22: note = Description of Artificial Sequence: Synthetic peptide
EQRNRQWWPCWLARLGDLCDLD

SEQ ID NO: 2691 - protein, 16 aa, synthetic construct
  REGION 1..16: note = Description of Artificial Sequence: Synthetic peptide
WYPCWLAQLGELCDLD

SEQ ID NO: 2692 - protein, 16 aa, synthetic construct
  REGION 1..16: note = Description of Artificial Sequence: Synthetic peptide
WLPCWMAHLGDLCDLE

SEQ ID NO: 2693 - protein, 22 aa, synthetic construct
  REGION 1..22: note = Description of Artificial Sequence: Synthetic peptide
RPSWAPCWLAQVGELCDLDHPE

SEQ ID NO: 2694 - protein, 22 aa, synthetic construct
  REGION 1..22: note = Description of Artificial Sequence: Synthetic peptide
ESKEPAFWPCWMAQLGDLCDLE

SEQ ID NO: 2695 - protein, 22 aa, synthetic construct
  REGION 1..22: note = Description of Artificial Sequence: Synthetic peptide
RSLRESWFPCWMAKLGDLCDLE

SEQ ID NO: 2696 - protein, 16 aa, synthetic construct
  REGION 1..16: note = Description of Artificial Sequence: Synthetic peptide
WHPCWLARVGDLCDLD

SEQ ID NO: 2697 - protein, 22 aa, synthetic construct
  REGION 1..22: note = Description of Artificial Sequence: Synthetic peptide
SRSAGEYYPCWLAQLGELCDLA

SEQ ID NO: 2698 - protein, 22 aa, synthetic construct
  REGION 1..22: note = Description of Artificial Sequence: Synthetic peptide
RQVPKQWYPCWMAALGELCDLE

SEQ ID NO: 2699 - protein, 16 aa, synthetic construct
  REGION 1..16: note = Description of Artificial Sequence: Synthetic peptide
WYPCWLAHLGELCDLE

SEQ ID NO: 2700 - protein, 21 aa, synthetic construct
  REGION 1..21: note = Description of Artificial Sequence: Synthetic peptide
QVMRLWYPCWMAQLGELCDLE

SEQ ID NO: 2701 - protein, 22 aa, synthetic construct
  REGION 1..22: note = Description of Artificial Sequence: Synthetic peptide
WYPCWMAQLGELCDLDEAPVQP

SEQ ID NO: 2702 - protein, 22 aa, synthetic construct
  REGION 1..22: note = Description of Artificial Sequence: Synthetic peptide
RDIWWPCWVAQLGELCDLDDPQ

SEQ ID NO: 2703 - protein, 22 aa, synthetic construct
  REGION 1..22: note = Description of Artificial Sequence: Synthetic peptide
SATWYPCFLANLGELCDLEQEN

SEQ ID NO: 2704 - protein, 22 aa, synthetic construct
  REGION 1..22: note = Description of Artificial Sequence: Synthetic peptide
YAEWYPCWMARVGEVCDLEVTP

SEQ ID NO: 2705 - protein, 22 aa, synthetic construct
  REGION 1..22: note = Description of Artificial Sequence: Synthetic peptide
RSGDKAFFPCWLAQLGDLCDLD

SEQ ID NO: 2706 - protein, 16 aa, synthetic construct
  REGION 1..16: note = Description of Artificial Sequence: Synthetic peptide
WYPCWMAQLGELCDMD

SEQ ID NO: 2707 - protein, 21 aa, synthetic construct
  REGION 1..21: note = Description of Artificial Sequence: Synthetic peptide
RVSYPCWLARLGELCDMDLEE

SEQ ID NO: 2708 - protein, 22 aa, synthetic construct
  REGION 1..22: note = Description of Artificial Sequence: Synthetic peptide
TESWYPCWLANLGDLCDLEWSA

SEQ ID NO: 2709 - protein, 16 aa, synthetic construct
  REGION 1..16: note = Description of Artificial Sequence: Synthetic peptide
WLPCWMADVGDLCDLD

SEQ ID NO: 2710 - protein, 16 aa, synthetic construct
  REGION 1..16: note = Description of Artificial Sequence: Synthetic peptide
WHPCWMARLGELCDLD

SEQ ID NO: 2711 - protein, 22 aa, synthetic construct
  REGION 1..22: note = Description of Artificial Sequence: Synthetic peptide
QGTKWHWNPCWMAQLGELCDLD

SEQ ID NO: 2712 - protein, 22 aa, synthetic construct
  REGION 1..22: note = Description of Artificial Sequence: Synthetic peptide
KNGPKSWYPCWMAQVGDLCDLD

SEQ ID NO: 2713 - protein, 22 aa, synthetic construct
  REGION 1..22: note = Description of Artificial Sequence: Synthetic peptide
SGTGPAWYPCFLASLGQLCDLE

SEQ ID NO: 2714 - protein, 16 aa, synthetic construct
  REGION 1..16: note = Description of Artificial Sequence: Synthetic peptide
WYPCWMARMGELCDLE

SEQ ID NO: 2715 - protein, 16 aa, synthetic construct
  REGION 1..16: note = Description of Artificial Sequence: Synthetic peptide
WLPCWRAQLGQLCDLD

SEQ ID NO: 2716 - protein, 16 aa, synthetic construct
  REGION 1..16: note = Description of Artificial Sequence: Synthetic peptide
LFPCWLAQLGELCDLE

SEQ ID NO: 2717 - protein, 16 aa, synthetic construct
  REGION 1..16: note = Description of Artificial Sequence: Synthetic peptide
RYPCWIAQLGELCDLD

SEQ ID NO: 2718 - protein, 16 aa, synthetic construct
  REGION 1..16: note = Description of Artificial Sequence: Synthetic peptide
WHPCWIAHLGELCDLE

SEQ ID NO: 2719 - protein, 16 aa, synthetic construct
  REGION 1..16: note = Description of Artificial Sequence: Synthetic peptide
MYPCWIAHLGELCDLD

SEQ ID NO: 2720 - protein, 16 aa, synthetic construct
  REGION 1..16: note = Description of Artificial Sequence: Synthetic peptide
WYPCSIASLGELCDLE

SEQ ID NO: 2721 - protein, 16 aa, synthetic construct
  REGION 1..16: note = Description of Artificial Sequence: Synthetic peptide
WLPCYMAQLGDLCDLE

SEQ ID NO: 2722 - protein, 16 aa, synthetic construct
  REGION 1..16: note = Description of Artificial Sequence: Synthetic peptide
WHPCWMAQVGEVCDLD

SEQ ID NO: 2723 - protein, 16 aa, synthetic construct
  REGION 1..16: note = Description of Artificial Sequence: Synthetic peptide
WYPCWLASLGEVCDLE

SEQ ID NO: 2724 - protein, 16 aa, synthetic construct
  REGION 1..16: note = Description of Artificial Sequence: Synthetic peptide
WWPCSIARLGQLCDLD

SEQ ID NO: 2725 - protein, 16 aa, synthetic construct
  REGION 1..16: note = Description of Artificial Sequence: Synthetic peptide
WYPCWLAHLGELCDLA

SEQ ID NO: 2726 - protein, 16 aa, synthetic construct
  REGION 1..16: note = Description of Artificial Sequence: Synthetic peptide
WYPCWLAQLGELCDAE

SEQ ID NO: 2727 - protein, 16 aa, synthetic construct
  REGION 1..16: note = Description of Artificial Sequence: Synthetic peptide
WKPCWMALLGELCDLE

SEQ ID NO: 2728 - protein, 16 aa, synthetic construct
  REGION 1..16: note = Description of Artificial Sequence: Synthetic peptide
RYPCWRAKLGELCDLD

SEQ ID NO: 2729 - protein, 22 aa, synthetic construct
  REGION 1..22: note = Description of Artificial Sequence: Synthetic peptide
EEQSRGFLPCWMALLGELCDLD

SEQ ID NO: 2730 - protein, 22 aa, synthetic construct
  REGION 1..22: note = Description of Artificial Sequence: Synthetic peptide
LGSKRQWYPCWVAHLGELCDLE

SEQ ID NO: 2731 - protein, 22 aa, synthetic construct
  REGION 1..22: note = Description of Artificial Sequence: Synthetic peptide
ESEGRGWYPCWNALLGELCDLE

SEQ ID NO: 2732 - protein, 22 aa, synthetic construct
  REGION 1..22: note = Description of Artificial Sequence: Synthetic peptide
RWTQAQWYPCWLAQLGELCDLE

SEQ ID NO: 2733 - protein, 21 aa, synthetic construct
  REGION 1..21: note = Description of Artificial Sequence: Synthetic peptide
LHAGRWNPCWLAQLGELCDLE

SEQ ID NO: 2734 - protein, 21 aa, synthetic construct
  REGION 1..21: note = Description of Artificial Sequence: Synthetic peptide
LSSKGWYPCWKARLGDLCDLE

SEQ ID NO: 2735 - protein, 22 aa, synthetic construct
  REGION 1..22: note = Description of Artificial Sequence: Synthetic peptide
DMFTHRWYPCSMAKLGELCDLE

SEQ ID NO: 2736 - protein, 22 aa, synthetic construct
  REGION 1..22: note = Description of Artificial Sequence: Synthetic peptide
MTDRAFWNPCWVARLGELCDLD

SEQ ID NO: 2737 - protein, 22 aa, synthetic construct
  REGION 1..22: note = Description of Artificial Sequence: Synthetic peptide
NVTYTQWFPCWLARLGELCDLV

SEQ ID NO: 2738 - protein, 21 aa, synthetic construct
  REGION 1..21: note = Description of Artificial Sequence: Synthetic peptide
VRTRIWYPCWSAQLGELCDLD

SEQ ID NO: 2739 - protein, 21 aa, synthetic construct
  REGION 1..21: note = Description of Artificial Sequence: Synthetic peptide
AMARRYLPCWIAKLGELCELD

SEQ ID NO: 2740 - protein, 22 aa, synthetic construct
  REGION 1..22: note = Description of Artificial Sequence: Synthetic peptide
ARGEYRWFPCWMARLGELCDLE

SEQ ID NO: 2741 - protein, 22 aa, synthetic construct
  REGION 1..22: note = Description of Artificial Sequence: Synthetic peptide
YLERSRWYPCFIAQLGELCDLE

SEQ ID NO: 2742 - protein, 22 aa, synthetic construct
  REGION 1..22: note = Description of Artificial Sequence: Synthetic peptide
FRVSRDWFPCWMAQLGEVCDLE

SEQ ID NO: 2743 - protein, 22 aa, synthetic construct
  REGION 1..22: note = Description of Artificial Sequence: Synthetic peptide
IERAWEWRPCWLASVGELCDLE

SEQ ID NO: 2744 - protein, 21 aa, synthetic construct
  REGION 1..21: note = Description of Artificial Sequence: Synthetic peptide
VASERFYPCWIARLGELCDVE

SEQ ID NO: 2745 - protein, 22 aa, synthetic construct
  REGION 1..22: note = Description of Artificial Sequence: Synthetic peptide
WYPCWIAKLGEVCDLDQGTTRQ

SEQ ID NO: 2746 - protein, 22 aa, synthetic construct
  REGION 1..22: note = Description of Artificial Sequence: Synthetic peptide
WYPCWLAHLGELCDLDWKGRND

SEQ ID NO: 2747 - protein, 22 aa, synthetic construct
  REGION 1..22: note = Description of Artificial Sequence: Synthetic peptide
WYPCWRAQLGELCDLVDLGSHL

SEQ ID NO: 2748 - protein, 22 aa, synthetic construct
  REGION 1..22: note = Description of Artificial Sequence: Synthetic peptide
WSPCWMASLGDLCDLEETRQTE

SEQ ID NO: 2749 - protein, 22 aa, synthetic construct
  REGION 1..22: note = Description of Artificial Sequence: Synthetic peptide
WTPCWIAQLGELCDLEGRHGTV

SEQ ID NO: 2750 - protein, 21 aa, synthetic construct
  REGION 1..21: note = Description of Artificial Sequence: Synthetic peptide
LPCWIAQLGDLCDLEPEPSPE

SEQ ID NO: 2751 - protein, 22 aa, synthetic construct
  REGION 1..22: note = Description of Artificial Sequence: Synthetic peptide
FYPCWAAHLGDLCDLEYQEAGP

SEQ ID NO: 2752 - protein, 22 aa, synthetic construct
  REGION 1..22: note = Description of Artificial Sequence: Synthetic peptide
WLPCWLAPLGDLCDMDMSAVMN

SEQ ID NO: 2753 - protein, 22 aa, synthetic construct
  REGION 1..22: note = Description of Artificial Sequence: Synthetic peptide
WRPCWMAHLGDLCDLEMANENP

SEQ ID NO: 2754 - protein, 22 aa, synthetic construct
  REGION 1..22: note = Description of Artificial Sequence: Synthetic peptide
WYPCWLAQLGEVCDLDDGGGVF

SEQ ID NO: 2755 - protein, 22 aa, synthetic construct
  REGION 1..22: note = Description of Artificial Sequence: Synthetic peptide
WWPCWLAQLGELCDLEVNGSLI

SEQ ID NO: 2756 - protein, 22 aa, synthetic construct
  REGION 1..22: note = Description of Artificial Sequence: Synthetic peptide
TEMWYPCWMAYQGELCDLDMTY

SEQ ID NO: 2757 - protein, 22 aa, synthetic construct
  REGION 1..22: note = Description of Artificial Sequence: Synthetic peptide
ARTWWPCWRAKLGELCDLVVPE

SEQ ID NO: 2758 - protein, 22 aa, synthetic construct
  REGION 1..22: note = Description of Artificial Sequence: Synthetic peptide
HQGFYSCRLARLGELCDLDTGW

SEQ ID NO: 2759 - protein, 22 aa, synthetic construct
  REGION 1..22: note = Description of Artificial Sequence: Synthetic peptide
VDEFYPCSMAGLGELCDLERQN

SEQ ID NO: 2760 - protein, 22 aa, synthetic construct
  REGION 1..22: note = Description of Artificial Sequence: Synthetic peptide
AWDWYPCSVAALGEICDLDIQD

SEQ ID NO: 2761 - protein, 22 aa, synthetic construct
  REGION 1..22: note = Description of Artificial Sequence: Synthetic peptide
RPPWYPCWMARLGEVCDMDIML

SEQ ID NO: 2762 - protein, 22 aa, synthetic construct
  REGION 1..22: note = Description of Artificial Sequence: Synthetic peptide
SQRWYPCWVAHLGELCDLEGVV

SEQ ID NO: 2763 - protein, 22 aa, synthetic construct
  REGION 1..22: note = Description of Artificial Sequence: Synthetic peptide
KGSWQPCWFAKLGELCDLHPTS

SEQ ID NO: 2764 - protein, 22 aa, synthetic construct
  REGION 1..22: note = Description of Artificial Sequence: Synthetic peptide
QTWYLPCWMAKLGELCDLGERD

SEQ ID NO: 2765 - protein, 22 aa, synthetic construct
  REGION 1..22: note = Description of Artificial Sequence: Synthetic peptide
EPRWYPCWMAQMGELCDMEMSD

SEQ ID NO: 2766 - protein, 22 aa, synthetic construct
  REGION 1..22: note = Description of Artificial Sequence: Synthetic peptide
WGGRYWCWMAKLGDLCDLEDEW

SEQ ID NO: 2767 - protein, 22 aa, synthetic construct
  REGION 1..22: note = Description of Artificial Sequence: Synthetic peptide
WWPCWIAQVGELCDLDGPGRPT

SEQ ID NO: 2768 - protein, 19 aa, synthetic construct
  REGION 1..19: note = Description of Artificial Sequence: Synthetic peptide
RLVYDCLFAQVGDLCEVIS

SEQ ID NO: 2769 - protein, 20 aa, synthetic construct
  REGION 1..20: note = Description of Artificial Sequence: Synthetic peptide
WRILWMQQCWRSHVVNQCAL

SEQ ID NO: 2770 - protein, 22 aa, synthetic construct
  REGION 1..22: note = Description of Artificial Sequence: Synthetic peptide
WYPCWIAQVGELCDLDEVSHGR

SEQ ID NO: 2771 - protein, 22 aa, synthetic construct
  REGION 1..22: note = Description of Artificial Sequence: Synthetic peptide
TGEWWPCWVAEVGELCDLERGP

SEQ ID NO: 2772 - protein, 20 aa, synthetic construct
  REGION 1..20: note = Description of Artificial Sequence: Synthetic peptide
ARTQGWYDCLFAQVGELCDL

SEQ ID NO: 2773 - protein, 22 aa, synthetic construct
  REGION 1..22: note = Description of Artificial Sequence: Synthetic peptide
FHPCWRALLGELCDLETALGPS

SEQ ID NO: 2774 - protein, 20 aa, synthetic construct
  REGION 1..20: note = Description of Artificial Sequence: Synthetic peptide
LQIRKLWACRIDLVGPFCLL

SEQ ID NO: 2775 - protein, 20 aa, synthetic construct
  REGION 1..20: note = Description of Artificial Sequence: Synthetic peptide
AEYSGRYDCYIAKVGELCDI

SEQ ID NO: 2776 - protein, 20 aa, synthetic construct
  REGION 1..20: note = Description of Artificial Sequence: Synthetic peptide
SWRFLWQDCGRAHVGELCDL

SEQ ID NO: 2777 - protein, 22 aa, synthetic construct
  REGION 1..22: note = Description of Artificial Sequence: Synthetic peptide
NRWWHPCWMARVGELCDLEPDA

SEQ ID NO: 2778 - protein, 22 aa, synthetic construct
  REGION 1..22: note = Description of Artificial Sequence: Synthetic peptide
WWPCWVAKLGELCDLEGDASRV

SEQ ID NO: 2779 - protein, 22 aa, synthetic construct
  REGION 1..22: note = Description of Artificial Sequence: Synthetic peptide
WYPCEFAQLGELCDLLPFPYPA

SEQ ID NO: 2780 - protein, 20 aa, synthetic construct
  REGION 1..20: note = Description of Artificial Sequence: Synthetic peptide
SYMHDCFMAQVGDLCDRFIS

SEQ ID NO: 2781 - protein, 22 aa, synthetic construct
  REGION 1..22: note = Description of Artificial Sequence: Synthetic peptide
WWPCWIAQVGELCDLEEESRES

SEQ ID NO: 2782 - protein, 22 aa, synthetic construct
  REGION 1..22: note = Description of Artificial Sequence: Synthetic peptide
KWAWNPCYIARLGELCDLVEPE

SEQ ID NO: 2783 - protein, 22 aa, synthetic construct
  REGION 1..22: note = Description of Artificial Sequence: Synthetic peptide
WWPCWIADLGELCDLEGPPRGR

SEQ ID NO: 2784 - protein, 20 aa, synthetic construct
  REGION 1..20: note = Description of Artificial Sequence: Synthetic peptide
PTLITWYDCLFAEVGELCDM

SEQ ID NO: 2785 - protein, 20 aa, synthetic construct
  REGION 1..20: note = Description of Artificial Sequence: Synthetic peptide
EISNWFLDCMFADVGDLCDL

SEQ ID NO: 2786 - protein, 22 aa, synthetic construct
  REGION 1..22: note = Description of Artificial Sequence: Synthetic peptide
AQVWYPCWLAKVGELCDLDQWN

SEQ ID NO: 2787 - protein, 22 aa, synthetic construct
  REGION 1..22: note = Description of Artificial Sequence: Synthetic peptide
FGGKMDWYPCWIANLGELCDLK

SEQ ID NO: 2788 - protein, 22 aa, synthetic construct
  REGION 1..22: note = Description of Artificial Sequence: Synthetic peptide
WFPCWMAKVGDLCDVDEHQDPS

SEQ ID NO: 2789 - protein, 22 aa, synthetic construct
  REGION 1..22: note = Description of Artificial Sequence: Synthetic peptide
MGDSSSWFPCWMAQLGELCDME

SEQ ID NO: 2790 - protein, 22 aa, synthetic construct
  REGION 1..22: note = Description of Artificial Sequence: Synthetic peptide
MFRYYPCWIASIGELCDLEWGV

SEQ ID NO: 2791 - protein, 22 aa, synthetic construct
  REGION 1..22: note = Description of Artificial Sequence: Synthetic peptide
ERRWYPCWLASVGELCDLDMGD

SEQ ID NO: 2792 - protein, 16 aa, synthetic construct
  REGION 1..16: note = Description of Artificial Sequence: Synthetic peptide
WYPCWVAQLGELCDLE

SEQ ID NO: 2793 - protein, 22 aa, synthetic construct
  REGION 1..22: note = Description of Artificial Sequence: Synthetic peptide
RWDYWPCYIAQVGELCDLEVYE

SEQ ID NO: 2794 - protein, 22 aa, synthetic construct
  REGION 1..22: note = Description of Artificial Sequence: Synthetic peptide
SLAHRSWYPCWLAQVGELCDLD

SEQ ID NO: 2795 - protein, 22 aa, synthetic construct
  REGION 1..22: note = Description of Artificial Sequence: Synthetic peptide
QNASKGWYPCWIAHVGELCDWD

SEQ ID NO: 2796 - protein, 21 aa, synthetic construct
  REGION 1..21: note = Description of Artificial Sequence: Synthetic peptide
HRWYPCWLAHLGELCDLDPMS

SEQ ID NO: 2797 - protein, 16 aa, synthetic construct
  REGION 1..16: note = Description of Artificial Sequence: Synthetic peptide
FYPCWIAFVGELCDLE

SEQ ID NO: 2798 - protein, 20 aa, synthetic construct
  REGION 1..20: note = Description of Artificial Sequence: Synthetic peptide
EGHWYPCWIAQLGELCDLDW

SEQ ID NO: 2799 - protein, 22 aa, synthetic construct
  REGION 1..22: note = Description of Artificial Sequence: Synthetic peptide
WTGWSAFYPCSIANLGELCDLD

SEQ ID NO: 2800 - protein, 22 aa, synthetic construct
  REGION 1..22: note = Description of Artificial Sequence: Synthetic peptide
WEKLQNWYPCWIAQMGELCDLE

SEQ ID NO: 2801 - protein, 22 aa, synthetic construct
  REGION 1..22: note = Description of Artificial Sequence: Synthetic peptide
TNGVLDWWPCWMAQVGELCDLD

SEQ ID NO: 2802 - protein, 16 aa, synthetic construct
  REGION 1..16: note = Description of Artificial Sequence: Synthetic peptide
WYPCWVAKLGELCDLE

SEQ ID NO: 2803 - protein, 19 aa, synthetic construct
  REGION 1..19: note = Description of Artificial Sequence: Synthetic peptide
AYYPCELAQLGELCDLYNI

SEQ ID NO: 2804 - protein, 16 aa, synthetic construct
  REGION 1..16: note = Description of Artificial Sequence: Synthetic peptide
WYPCWMAHLGELCDLE

SEQ ID NO: 2805 - protein, 21 aa, synthetic construct
  REGION 1..21: note = Description of Artificial Sequence: Synthetic peptide
NDHTAWWPCYFAQVGDLCDLV

SEQ ID NO: 2806 - protein, 22 aa, synthetic construct
  REGION 1..22: note = Description of Artificial Sequence: Synthetic peptide
WWPCEIAQIGELCDLEWVRHAE

SEQ ID NO: 2807 - protein, 22 aa, synthetic construct
  REGION 1..22: note = Description of Artificial Sequence: Synthetic peptide
WWPCDFAQIGELCDLGPRFTGE

SEQ ID NO: 2808 - protein, 22 aa, synthetic construct
  REGION 1..22: note = Description of Artificial Sequence: Synthetic peptide
RDWWLPCEFALIGELCDLERSW

SEQ ID NO: 2809 - protein, 20 aa, synthetic construct
  REGION 1..20: note = Description of Artificial Sequence: Synthetic peptide
MRTTFWYDCYIAQVGELCDF

SEQ ID NO: 2810 - protein, 22 aa, synthetic construct
  REGION 1..22: note = Description of Artificial Sequence: Synthetic peptide
SWHAETWYPCWLAQVGELCDLD

SEQ ID NO: 2811 - protein, 20 aa, synthetic construct
  REGION 1..20: note = Description of Artificial Sequence: Synthetic peptide
EWFHDCFLAKVGDLCDLFLW

SEQ ID NO: 2812 - protein, 22 aa, synthetic construct
  REGION 1..22: note = Description of Artificial Sequence: Synthetic peptide
SGKTQMWNPCYVAKVGELCDLV

SEQ ID NO: 2813 - protein, 22 aa, synthetic construct
  REGION 1..22: note = Description of Artificial Sequence: Synthetic peptide
DKAGPNFYPCWLAHVGELCDQA

SEQ ID NO: 2814 - protein, 22 aa, synthetic construct
  REGION 1..22: note = Description of Artificial Sequence: Synthetic peptide
AGFRGRWWPCEYAQVGELCDLE

SEQ ID NO: 2815 - protein, 22 aa, synthetic construct
  REGION 1..22: note = Description of Artificial Sequence: Synthetic peptide
WFPCWLAKVGELCDRDDLAGPS

SEQ ID NO: 2816 - protein, 16 aa, synthetic construct
  REGION 1..16: note = Description of Artificial Sequence: Synthetic peptide
WWPCEWARIGELCDLE

SEQ ID NO: 2817 - protein, 20 aa, synthetic construct
  REGION 1..20: note = Description of Artificial Sequence: Synthetic peptide
KGSSWFPCYFAQVGDLCDLY

SEQ ID NO: 2818 - protein, 16 aa, synthetic construct
  REGION 1..16: note = Description of Artificial Sequence: Synthetic peptide
WYPCWLAQVGELCDRE

SEQ ID NO: 2819 - protein, 21 aa, synthetic construct
  REGION 1..21: note = Description of Artificial Sequence: Synthetic peptide
RGVYFPCWLAKVGDLCDSDEF

SEQ ID NO: 2820 - protein, 22 aa, synthetic construct
  REGION 1..22: note = Description of Artificial Sequence: Synthetic peptide
RAWWWPCELAQVGELCDLEPSS

SEQ ID NO: 2821 - protein, 16 aa, synthetic construct
  REGION 1..16: note = Description of Artificial Sequence: Synthetic peptide
WYPCWLAKVGELCDQE

SEQ ID NO: 2822 - protein, 20 aa, synthetic construct
  REGION 1..20: note = Description of Artificial Sequence: Synthetic peptide
RYVPDCLKAQVGDLCDFFAW

SEQ ID NO: 2823 - protein, 16 aa, synthetic construct
  REGION 1..16: note = Description of Artificial Sequence: Synthetic peptide
WWPCYLAQIGELCDLV

SEQ ID NO: 2824 - protein, 16 aa, synthetic construct
  REGION 1..16: note = Description of Artificial Sequence: Synthetic peptide
WYPCWMAKVGELCDME

SEQ ID NO: 2825 - protein, 22 aa, synthetic construct
  REGION 1..22: note = Description of Artificial Sequence: Synthetic peptide
QITDSGWYPCWVAKVGELCDMD

SEQ ID NO: 2826 - protein, 22 aa, synthetic construct
  REGION 1..22: note = Description of Artificial Sequence: Synthetic peptide
YRWWYPCDIAQVGELCDLDYLL

SEQ ID NO: 2827 - protein, 20 aa, synthetic construct
  REGION 1..20: note = Description of Artificial Sequence: Synthetic peptide
CYMHDCFMAQVGDLCDRFIS

SEQ ID NO: 2828 - protein, 16 aa, synthetic construct
  REGION 1..16: note = Description of Artificial Sequence: Synthetic peptide
WLPCWIAKIGDLCDLD

SEQ ID NO: 2829 - protein, 22 aa, synthetic construct
  REGION 1..22: note = Description of Artificial Sequence: Synthetic peptide
SRVWHPCWLARVGELCDLEVSD

SEQ ID NO: 2830 - protein, 22 aa, synthetic construct
  REGION 1..22: note = Description of Artificial Sequence: Synthetic peptide
WEHEFTWYPCWIAQVGELCDMD

SEQ ID NO: 2831 - protein, 22 aa, synthetic construct
  REGION 1..22: note = Description of Artificial Sequence: Synthetic peptide
HRGWVGWYPCEYALPGQLCDLE

SEQ ID NO: 2832 - protein, 21 aa, synthetic construct
  REGION 1..21: note = Description of Artificial Sequence: Synthetic peptide
WYPCWLAQLGELCDQDWDTPS

SEQ ID NO: 2833 - protein, 22 aa, synthetic construct
  REGION 1..22: note = Description of Artificial Sequence: Synthetic peptide
RVRRHSWWPCEIAVVGELCDLE

SEQ ID NO: 2834 - protein, 21 aa, synthetic construct
  REGION 1..21: note = Description of Artificial Sequence: Synthetic peptide
DGWWPCWIAQVGELCDLEDPV

SEQ ID NO: 2835 - protein, 20 aa, synthetic construct
  REGION 1..20: note = Description of Artificial Sequence: Synthetic peptide
LPFQDCYIAQVGELCDLPGT

SEQ ID NO: 2836 - protein, 20 aa, synthetic construct
  REGION 1..20: note = Description of Artificial Sequence: Synthetic peptide
RWMFDCLFARVGELCDIRPW

SEQ ID NO: 2837 - protein, 20 aa, synthetic construct
  REGION 1..20: note = Description of Artificial Sequence: Synthetic peptide
GGYYDCLIAEVGELCDMPGQ

SEQ ID NO: 2838 - protein, 20 aa, synthetic construct
  REGION 1..20: note = Description of Artificial Sequence: Synthetic peptide
VVCYACDIAHVGELCDLTCR

SEQ ID NO: 2839 - protein, 20 aa, synthetic construct
  REGION 1..20: note = Description of Artificial Sequence: Synthetic peptide
TPWYDCYIANVGDLCDFASA

SEQ ID NO: 2840 - protein, 20 aa, synthetic construct
  REGION 1..20: note = Description of Artificial Sequence: Synthetic peptide
LESLDCFFARIGDLCEIWDV

SEQ ID NO: 2841 - protein, 20 aa, synthetic construct
  REGION 1..20: note = Description of Artificial Sequence: Synthetic peptide
WQIFDCYLAQVGELCDLQDT

SEQ ID NO: 2842 - protein, 20 aa, synthetic construct
  REGION 1..20: note = Description of Artificial Sequence: Synthetic peptide
GRYPDCYIAHVGELCEFYDG

SEQ ID NO: 2843 - protein, 20 aa, synthetic construct
  REGION 1..20: note = Description of Artificial Sequence: Synthetic peptide
FGDDFCRFIPLFEMCTTDVE

SEQ ID NO: 2844 - protein, 20 aa, synthetic construct
  REGION 1..20: note = Description of Artificial Sequence: Synthetic peptide
LVYYDCYMAQVGELCDLPSL

SEQ ID NO: 2845 - protein, 20 aa, synthetic construct
  REGION 1..20: note = Description of Artificial Sequence: Synthetic peptide
VSRYDCYIAKVGELCDFFEF

SEQ ID NO: 2846 - protein, 20 aa, synthetic construct
  REGION 1..20: note = Description of Artificial Sequence: Synthetic peptide
VTVQDCYFARVGDLCDLFSP

SEQ ID NO: 2847 - protein, 20 aa, synthetic construct
  REGION 1..20: note = Description of Artificial Sequence: Synthetic peptide
WEWYDCLMAQVGELCDFEGN

SEQ ID NO: 2848 - protein, 20 aa, synthetic construct
  REGION 1..20: note = Description of Artificial Sequence: Synthetic peptide
WAFYDCRNAQVGDFCDLWEF

SEQ ID NO: 2849 - protein, 20 aa, synthetic construct
  REGION 1..20: note = Description of Artificial Sequence: Synthetic peptide
SMDQDCYFAQVGELCVLFNQ

SEQ ID NO: 2850 - protein, 20 aa, synthetic construct
  REGION 1..20: note = Description of Artificial Sequence: Synthetic peptide
GGYYDCLIAEVGELCDIYGR

SEQ ID NO: 2851 - protein, 20 aa, synthetic construct
  REGION 1..20: note = Description of Artificial Sequence: Synthetic peptide
SNWHDCLFAQVGELCDLPGS

SEQ ID NO: 2852 - protein, 14 aa, synthetic construct
  REGION 1..14: note = Description of Artificial Sequence: Synthetic peptide
YDCYIAQVGELCDI

SEQ ID NO: 2853 - protein, 20 aa, synthetic construct
  REGION 1..20: note = Description of Artificial Sequence: Synthetic peptide
SWLSDLQDCYIAQVGDLCQI

SEQ ID NO: 2854 - skipped

SEQ ID NO: 2855 - protein, 20 aa, synthetic construct
  REGION 1..20: note = Description of Artificial Sequence: Synthetic peptide
RLASDWWDCYIAKVGELCDF

SEQ ID NO: 2856 - protein, 20 aa, synthetic construct
  REGION 1..20: note = Description of Artificial Sequence: Synthetic peptide
RLLRDCFLAKVGDLCELFVW

SEQ ID NO: 2857 - protein, 20 aa, synthetic construct
  REGION 1..20: note = Description of Artificial Sequence: Synthetic peptide
QWFHNCFLARVGDTCDLFLW

SEQ ID NO: 2858 - protein, 20 aa, synthetic construct
  REGION 1..20: note = Description of Artificial Sequence: Synthetic peptide
ELLVDCFKVKVGELCDLFFG

SEQ ID NO: 2859 - protein, 20 aa, synthetic construct
  REGION 1..20: note = Description of Artificial Sequence: Synthetic peptide
RYVHDCFIAQVGDLCDLFLH

SEQ ID NO: 2860 - protein, 20 aa, synthetic construct
  REGION 1..20: note = Description of Artificial Sequence: Synthetic peptide
KWVHDCFLAKVGDVCDLFVV

SEQ ID NO: 2861 - protein, 20 aa, synthetic construct
  REGION 1..20: note = Description of Artificial Sequence: Synthetic peptide
RSLVDCFLVKVGDLCDFFNW

SEQ ID NO: 2862 - protein, 20 aa, synthetic construct
  REGION 1..20: note = Description of Artificial Sequence: Synthetic peptide
RYLYDCFLALVGDLCVKFHQ

SEQ ID NO: 2863 - protein, 20 aa, synthetic construct
  REGION 1..20: note = Description of Artificial Sequence: Synthetic peptide
AHFYDCFWAKAGELCDLWPS

SEQ ID NO: 2864 - protein, 20 aa, synthetic construct
  REGION 1..20: note = Description of Artificial Sequence: Synthetic peptide
KWFHDCFLAKVGDLCDLFLW

SEQ ID NO: 2865 - protein, 22 aa, synthetic construct
  REGION 1..22: note = Description of Artificial Sequence: Synthetic peptide
WGKLVRDCFLAKVGDLCDLFLW

SEQ ID NO: 2866 - protein, 20 aa, synthetic construct
  REGION 1..20: note = Description of Artificial Sequence: Synthetic peptide
THVHDCFLAKVGDLCDLFIV

SEQ ID NO: 2867 - protein, 20 aa, synthetic construct
  REGION 1..20: note = Description of Artificial Sequence: Synthetic peptide
HWVRDCFLAKVGELCDLFLW

SEQ ID NO: 2868 - protein, 20 aa, synthetic construct
  REGION 1..20: note = Description of Artificial Sequence: Synthetic peptide
HGILDCYFAKVGELCELFDW

SEQ ID NO: 2869 - protein, 20 aa, synthetic construct
  REGION 1..20: note = Description of Artificial Sequence: Synthetic peptide
QFVKDCFLAQVGDLCELFLW

SEQ ID NO: 2870 - protein, 20 aa, synthetic construct
  REGION 1..20: note = Description of Artificial Sequence: Synthetic peptide
DWLPDCYFANVGDLCSLFGS

SEQ ID NO: 2871 - protein, 20 aa, synthetic construct
  REGION 1..20: note = Description of Artificial Sequence: Synthetic peptide
HWFLDCFLANVGDLCDFFGN

SEQ ID NO: 2872 - protein, 20 aa, synthetic construct
  REGION 1..20: note = Description of Artificial Sequence: Synthetic peptide
NWLPDCLFANVGELCDIFPW

SEQ ID NO: 2873 - protein, 20 aa, synthetic construct
  REGION 1..20: note = Description of Artificial Sequence: Synthetic peptide
EIFKDCLFANVGELCEIFPS

SEQ ID NO: 2874 - protein, 20 aa, synthetic construct
  REGION 1..20: note = Description of Artificial Sequence: Synthetic peptide
NWFHDCFLARVGDLCDLFLD

SEQ ID NO: 2875 - protein, 20 aa, synthetic construct
  REGION 1..20: note = Description of Artificial Sequence: Synthetic peptide
YSFKDCYFAKVGELCELFLW

SEQ ID NO: 2876 - protein, 20 aa, synthetic construct
  REGION 1..20: note = Description of Artificial Sequence: Synthetic peptide
EFFHDCYVARVGELCDLFGW

SEQ ID NO: 2877 - protein, 16 aa, synthetic construct
  REGION 1..16: note = Description of Artificial Sequence: Synthetic peptide
SYLCWLDHWGVICEED

SEQ ID NO: 2878 - protein, 16 aa, synthetic construct
  REGION 1..16: note = Description of Artificial Sequence: Synthetic peptide
WYTCMMDWLGVHCELE

SEQ ID NO: 2879 - protein, 22 aa, synthetic construct
  REGION 1..22: note = Description of Artificial Sequence: Synthetic peptide
QMVWWDCWSTQEGPVCELNWTA

SEQ ID NO: 2880 - protein, 20 aa, synthetic construct
  REGION 1..20: note = Description of Artificial Sequence: Synthetic peptide
YWCSVWQLGSVCEMNNEETQ

SEQ ID NO: 2881 - protein, 22 aa, synthetic construct
  REGION 1..22: note = Description of Artificial Sequence: Synthetic peptide
WTCWLTQLGYDCNLDVVDQSLG

SEQ ID NO: 2882 - protein, 22 aa, synthetic construct
  REGION 1..22: note = Description of Artificial Sequence: Synthetic peptide
DGSWYTCWFTQLGEWCEQDDAK

SEQ ID NO: 2883 - protein, 22 aa, synthetic construct
  REGION 1..22: note = Description of Artificial Sequence: Synthetic peptide
EFWGWQCWQEPLGWSCDLEWMD

SEQ ID NO: 2884 - protein, 16 aa, synthetic construct
  REGION 1..16: note = Description of Artificial Sequence: Synthetic peptide
WYPCWIARVGELCDLE

SEQ ID NO: 2885 - protein, 16 aa, synthetic construct
  REGION 1..16: note = Description of Artificial Sequence: Synthetic peptide
WYPCWLAQVGELCDLD

SEQ ID NO: 2886 - protein, 16 aa, synthetic construct
  REGION 1..16: note = Description of Artificial Sequence: Synthetic peptide
LVDCFKVKVGELCDLF

SEQ ID NO: 2887 - protein, 16 aa, synthetic construct
  REGION 1..16: note = Description of Artificial Sequence: Synthetic peptide
VHDCFIAQVGDLCDLF

SEQ ID NO: 2888 - protein, 14 aa, synthetic construct
  REGION 1..14: note = Description of Artificial Sequence: Synthetic peptide
WPCWAALGELCDLD

SEQ ID NO: 2889 - protein, 13 aa, synthetic construct
  REGION 1..13: note = Description of Artificial Sequence: Synthetic peptide
WPCWALGELCDLD

SEQ ID NO: 2890 - protein, 12 aa, synthetic construct
  REGION 1..12: note = Description of Artificial Sequence: Synthetic peptide
WPCWLGELCDLD

SEQ ID NO: 2891 - protein, 12 aa, synthetic construct
  REGION 1..12: note = Description of Artificial Sequence: Synthetic peptide
WYPCWGELCDLD

SEQ ID NO: 2892-2899 - skipped (8 entries)

SEQ ID NO: 2900 - protein, 20 aa, synthetic construct
  REGION 1..20: note = Description of Artificial Sequence: Synthetic peptide
  MOD_RES 1: note = A, D, E, H, K, N, Q, R, or T
  MOD_RES 2: note = F, G, H, I, L, S, W, or Y
  MOD_RES 3: note = F, I, L, or V
  MOD_RES 4: note = H, K, L, P, R, V, or Y
  MOD_RES 7: note = F, L, or Y
  MOD_RES 8: note = F, I, K, L, V, or W
  MOD_RES 9: note = A or V
  MOD_RES 10: note = K, L, N, Q, or R
  MOD_RES 11: note = A or V
  MOD_RES 13: note = D or E
  MOD_RES 14: note = L, T, or V
  MOD_RES 16: note = D, E, S, or V
  MOD_RES 17: note = F, I, K, or L
  MOD_RES 18: note = F or W
  MOD_RES 19: note = D, F, G, I, L, N, P, or V
  MOD_RES 20: note = D, G, H, N, Q, S V, or W
XXXXDCXXXXXGXXCXXXXX

SEQ ID NO: 2901 - protein, 18 aa, synthetic construct
  REGION 1..18: note = Description of Artificial Sequence: Synthetic peptide
  MOD_RES 1: note = F, G, H, I, L, S, W, or Y
  MOD_RES 2: note = F, I, L, or V
  MOD_RES 3: note = H, K, L, P, R, V, or Y
  MOD_RES 6: note = F, L, or Y
  MOD_RES 7: note = F, I, K, L, V, or W
  MOD_RES 8: note = A or V
  MOD_RES 9: note = K, L, N, Q, or R
  MOD_RES 10: note = A or V
  MOD_RES 12: note = D or E
  MOD_RES 13: note = L, T, or V
  MOD_RES 15: note = D, E, S, or V
  MOD_RES 16: note = F, I, K, or L
  MOD_RES 17: note = F or W
  MOD_RES 18: note = D, F, G, I, L, N, P, or V
XXXDCXXXXXGXXCXXXX

SEQ ID NO: 2902 - protein, 16 aa, synthetic construct
  REGION 1..16: note = Description of Artificial Sequence: Synthetic peptide
  MOD_RES 1: note = F, I, L, or V
  MOD_RES 2: note = H, K, L, P, R, V, or Y
  MOD_RES 5: note = F, L, or Y
  MOD_RES 6: note = F, I, K, L, V, or W
  MOD_RES 7: note = A or V
  MOD_RES 8: note = K, L, N, Q, or R
  MOD_RES 9: note = A or V
  MOD_RES 11: note = D or E
  MOD_RES 12: note = L, T, or V
  MOD_RES 14: note = D, E, S, or V
  MOD_RES 15: note = F, I, K, or L
  MOD_RES 16: note = F or W
XXDCXXXXXGXXCXXX

SEQ ID NO: 2903 - protein, 14 aa, synthetic construct
  REGION 1..14: note = Description of Artificial Sequence: Synthetic peptide
  MOD_RES 1: note = H, K, L, P, R, V, or Y
  MOD_RES 4: note = F, L, or Y
  MOD_RES 5: note = F, I, K, L, V, or W
  MOD_RES 6: note = A or V
  MOD_RES 7: note = K, L, N, Q, or R
  MOD_RES 8: note = A or V
  MOD_RES 10: note = D or E
  MOD_RES 11: note = L, T, or V
  MOD_RES 13: note = D, E, S, or V
  MOD_RES 14: note = F, I, K, or L
XDCXXXXXGXXCXX

SEQ ID NO: 2904 - protein, 12 aa, synthetic construct
  REGION 1..12: note = Description of Artificial Sequence: Synthetic peptide
  MOD_RES 3: note = F, L, or Y
  MOD_RES 4: note = F, I, K, L, V, or W
  MOD_RES 5: note = A or V
  MOD_RES 6: note = K, L, N, Q, or R
  MOD_RES 7: note = A or V
  MOD_RES 9: note = D or E
  MOD_RES 10: note = L, T, or V
  MOD_RES 12: note = D, E, S, or V
DCXXXXXGXXCX

SEQ ID NO: 2905-2906 - skipped (2 entries)

SEQ ID NO: 2907 - protein, 20 aa, synthetic construct
  REGION 1..20: note = Description of Artificial Sequence: Synthetic peptide
AFFHDCFFAKAGDLCDFFDD

SEQ ID NO: 2908 - protein, 20 aa, synthetic construct
  REGION 1..20: note = Description of Artificial Sequence: Synthetic peptide
DFFHDCFFAKVGDLCDFFFG

SEQ ID NO: 2909 - protein, 20 aa, synthetic construct
  REGION 1..20: note = Description of Artificial Sequence: Synthetic peptide
EGFHDCFFAKVGDLCDIFGH

SEQ ID NO: 2910 - protein, 20 aa, synthetic construct
  REGION 1..20: note = Description of Artificial Sequence: Synthetic peptide
EHFHDCFFAKVGDLCDIFGN

SEQ ID NO: 2911 - protein, 20 aa, synthetic construct
  REGION 1..20: note = Description of Artificial Sequence: Synthetic peptide
EHFHDCFFAKVGDLCDKFGQ

SEQ ID NO: 2912 - protein, 20 aa, synthetic construct
  REGION 1..20: note = Description of Artificial Sequence: Synthetic peptide
HIFHDCFIAKVGDLCDLFHS

SEQ ID NO: 2913 - protein, 20 aa, synthetic construct
  REGION 1..20: note = Description of Artificial Sequence: Synthetic peptide
HLFHDCFKAKVGDLCDLFIS

SEQ ID NO: 2914 - protein, 20 aa, synthetic construct
  REGION 1..20: note = Description of Artificial Sequence: Synthetic peptide
HLFKDCFLAKVGDLCDLFLS

SEQ ID NO: 2915 - protein, 22 aa, synthetic construct
  REGION 1..22: note = Description of Artificial Sequence: Synthetic peptide
WGKSIKDCFLAKVGDLCDLFLV

SEQ ID NO: 2916 - protein, 20 aa, synthetic construct
  REGION 1..20: note = Description of Artificial Sequence: Synthetic peptide
KSLKDCFLAKVGDLCDLFLV

SEQ ID NO: 2917 - protein, 20 aa, synthetic construct
  REGION 1..20: note = Description of Artificial Sequence: Synthetic peptide
KWLLDCFLALVGDLCDLFLW

SEQ ID NO: 2918 - protein, 20 aa, synthetic construct
  REGION 1..20: note = Description of Artificial Sequence: Synthetic peptide
NWLLDCFLANVGDLCDLFLW

SEQ ID NO: 2919 - protein, 20 aa, synthetic construct
  REGION 1..20: note = Description of Artificial Sequence: Synthetic peptide
NWLPDCFLANVGELCDLFLW

SEQ ID NO: 2920 - protein, 20 aa, synthetic construct
  REGION 1..20: note = Description of Artificial Sequence: Synthetic peptide
QWLPDCFLANVGELCDLFLW

SEQ ID NO: 2921 - protein, 20 aa, synthetic construct
  REGION 1..20: note = Description of Artificial Sequence: Synthetic peptide
QWVRDCLLANVGELCELFLW

SEQ ID NO: 2922 - protein, 20 aa, synthetic construct
  REGION 1..20: note = Description of Artificial Sequence: Synthetic peptide
RWVRDCLLAQVGELCELFNW

SEQ ID NO: 2923 - protein, 20 aa, synthetic construct
  REGION 1..20: note = Description of Artificial Sequence: Synthetic peptide
RWVVDCYLAQVGELCELFPW

SEQ ID NO: 2924 - protein, 20 aa, synthetic construct
  REGION 1..20: note = Description of Artificial Sequence: Synthetic peptide
RWVVDCYLARVGELCELFPW

SEQ ID NO: 2925 - protein, 20 aa, synthetic construct
  REGION 1..20: note = Description of Artificial Sequence: Synthetic peptide
TYVYDCYVVRVGETCSLFPW

SEQ ID NO: 2926 - protein, 20 aa, synthetic construct
  REGION 1..20: note = Description of Artificial Sequence: Synthetic peptide
YYVYNCYWVRVGEVCVLWVW

SEQ ID NO: 2927-2929 - skipped (3 entries)

SEQ ID NO: 2930 - protein, 24 aa, synthetic construct
  REGION 1..24: note = Description of Artificial Sequence: Synthetic peptide
GGWYPCWIARVGELCDLEEGPVNR

SEQ ID NO: 2931 - protein, 23 aa, synthetic construct
  REGION 1..23: note = Description of Artificial Sequence: Synthetic peptide
GGAVEFYPCWLARIGELCDLVEP

SEQ ID NO: 2932 - protein, 18 aa, synthetic construct
  REGION 1..18: note = Description of Artificial Sequence: Synthetic peptide
GGWYPCWIARVGELCDME

SEQ ID NO: 2933 - protein, 25 aa, synthetic construct
  REGION 1..25: note = Description of Artificial Sequence: Synthetic peptide
GGEWFHDCFLAKVGDLCDLFLGGEW

SEQ ID NO: 2934 - protein, 22 aa, synthetic construct
  REGION 1..22: note = Description of Artificial Sequence: Synthetic peptide
GGRYVHDCFIAQVGDLCDLFLH

SEQ ID NO: 2935 - protein, 22 aa, synthetic construct
  REGION 1..22: note = Description of Artificial Sequence: Synthetic peptide
GGRSLVDCFLVKVGDLCDFFNW

SEQ ID NO: 2936 - protein, 18 aa, synthetic construct
  REGION 1..18: note = Description of Artificial Sequence: Synthetic peptide
GGWYPCWIARVGELCDLE

SEQ ID NO: 2937 - protein, 18 aa, synthetic construct
  REGION 1..18: note = Description of Artificial Sequence: Synthetic peptide
GGWYPCWLAQVGELCDLD

SEQ ID NO: 2938 - protein, 18 aa, synthetic construct
  REGION 1..18: note = Description of Artificial Sequence: Synthetic peptide
GGLVDCFKVKVGELCDLF

SEQ ID NO: 2939 - protein, 18 aa, synthetic construct
  REGION 1..18: note = Description of Artificial Sequence: Synthetic peptide
GGWYSCWMAQLGELCDLD

SEQ ID NO: 2940-4069 - skipped (1130 entries)

SEQ ID NO: 4070 - protein, 47 aa, synthetic construct
  REGION 1..47: note = Description of Artificial Sequence: Synthetic polypeptide
GGWYPCWIARVGELCDLEEGPVNRGGGGSGGVVCQDWEGVELCWQGG

SEQ ID NO: 4071 - protein, 46 aa, synthetic construct
  REGION 1..46: note = Description of Artificial Sequence: Synthetic polypeptide
GGAVEFYPCWLARIGELCDLVEPGGGGSGGVVCQDWEGVELCWQGG

SEQ ID NO: 4072 - protein, 41 aa, synthetic construct
  REGION 1..41: note = Description of Artificial Sequence: Synthetic polypeptide
GGWYPCWIARVGELCDMEGGGGSGGVVCQDWEGVELCWQGG

SEQ ID NO: 4073 - protein, 45 aa, synthetic construct
  REGION 1..45: note = Description of Artificial Sequence: Synthetic polypeptide
GGEWFHDCFLAKVGDLCDLFLWGGGGSGGVVCQDWEGVELCWQGG

SEQ ID NO: 4074 - protein, 45 aa, synthetic construct
  REGION 1..45: note = Description of Artificial Sequence: Synthetic polypeptide
GGRYVHDCFIAQVGDLCDLFLHGGGGSGGVVCQDWEGVELCWQGG

SEQ ID NO: 4075 - protein, 45 aa, synthetic construct
  REGION 1..45: note = Description of Artificial Sequence: Synthetic polypeptide
GGRSLVDCFLVKVGDLCDFFNWGGGGSGGVVCQDWEGVELCWQGG

SEQ ID NO: 4076 - protein, 41 aa, synthetic construct
  REGION 1..41: note = Description of Artificial Sequence: Synthetic polypeptide
GGWYPCWIARVGELCDLEGGGGSGGVVCQDWEGVELCWQGG

SEQ ID NO: 4077 - protein, 41 aa, synthetic construct
  REGION 1..41: note = Description of Artificial Sequence: Synthetic polypeptide
GGWYPCWLAQVGELCDLDGGGGSGGVVCQDWEGVELCWQGG

SEQ ID NO: 4078 - protein, 52 aa, synthetic construct
  REGION 1..52: note = Description of Artificial Sequence: Synthetic polypeptide
GGWYPCWIARVGELCDLEEGPVNRGGGGSGGGGSGGVVCQDWEGVELCWQGG

SEQ ID NO: 4079 - protein, 57 aa, synthetic construct
  REGION 1..57: note = Description of Artificial Sequence: Synthetic polypeptide
GGWYPCWIARVGELCDLEEGPVNRGGGGSGGGGSGGGGSGGVVCQDWEGVELCWQGG

SEQ ID NO: 4080 - protein, 50 aa, synthetic construct
  REGION 1..50: note = Description of Artificial Sequence: Synthetic polypeptide
GGRYVHDCFIAQVGDLCDLFLHGGGGSGGGGSGGVVCQDWEGVELCWQGG

SEQ ID NO: 4081 - protein, 55 aa, synthetic construct
  REGION 1..55: note = Description of Artificial Sequence: Synthetic polypeptide
GGRYVHDCFIAQVGDLCDLFLHGGGGSGGGGSGGGGSGGVVCQDWEGVELCWQGG

SEQ ID NO: 4082 - protein, 60 aa, synthetic construct
  REGION 1..60: note = Description of Artificial Sequence: Synthetic polypeptide
GGRYVHDCFIAQVGDLCDLFLHGGGGSGGGGSGGGGSGGGGSGGVVCQDWEGVELCWQGG

SEQ ID NO: 4083 - protein, 41 aa, synthetic construct
  REGION 1..41: note = Description of Artificial Sequence: Synthetic polypeptide
GGLVDCFKVKVGELCDLFGGGGSGGVVCQDWEGVELCWQGG

SEQ ID NO: 4084 - protein, 45 aa, synthetic construct; identical to SEQ ID NO: 4074
  REGION 1..45: note = Description of Artificial Sequence: Synthetic polypeptide

SEQ ID NO: 4085 - protein, 41 aa, synthetic construct
  REGION 1..41: note = Description of Artificial Sequence: Synthetic polypeptide
GGWYSCWMAQLGELCDLDGGGGSGGVVCQDWEGVELCWQGG

SEQ ID NO: 4086-4089 - skipped (4 entries)

SEQ ID NO: 4090 - protein, 37 aa, synthetic construct; identical to SEQ ID NO: 1264
  REGION 1..37: note = Description of Artificial Sequence: Synthetic polypeptide

SEQ ID NO: 4091 - protein, 37 aa, synthetic construct
  REGION 1..37: note = Description of Artificial Sequence: Synthetic polypeptide
WYPCWMAQLGELCDLDGGGGSGGVVCQDWEGVALCWQ

SEQ ID NO: 4092 - protein, 37 aa, synthetic construct
  REGION 1..37: note = Description of Artificial Sequence: Synthetic polypeptide
  MOD_RES 6: note = Abu
WYPCWXAQLGELCDLDGGGGSGGVVCQDWEGVELCWQ

SEQ ID NO: 4093 - protein, 37 aa, synthetic construct
  REGION 1..37: note = Description of Artificial Sequence: Synthetic polypeptide
  MOD_RES 6: note = Abu
WYPCWXAQLGELCDLDGGGGSGGVVCQDWEGVALCWQ

SEQ ID NO: 4094 - protein, 37 aa, synthetic construct; identical to SEQ ID NO: 1264
  REGION 1..37: note = Description of Artificial Sequence: Synthetic polypeptide

SEQ ID NO: 4095 - protein, 45 aa, synthetic construct
  REGION 1..45: note = Description of Artificial Sequence: Synthetic polypeptide
GGELLVDCFKVKVGELCDLFFGGGGGSGGVVCQDWEGVELCWQGG

SEQ ID NO: 4096 - protein, 45 aa, synthetic construct; identical to SEQ ID NO: 4074
  REGION 1..45: note = Description of Artificial Sequence: Synthetic polypeptide

SEQ ID NO: 4097 - protein, 45 aa, synthetic construct
  REGION 1..45: note = Description of Artificial Sequence: Synthetic polypeptide
GGKWVHDCFLAKVGDVCDLFVVGGGGSGGVVCQDWEGVELCWQGG

SEQ ID NO: 4098 - protein, 45 aa, synthetic construct; identical to SEQ ID NO: 4075
  REGION 1..45: note = Description of Artificial Sequence: Synthetic polypeptide

SEQ ID NO: 4099 - protein, 45 aa, synthetic construct; identical to SEQ ID NO: 4073
  REGION 1..45: note = Description of Artificial Sequence: Synthetic polypeptide

SEQ ID NO: 4100-8060 - skipped (3961 entries)

SEQ ID NO: 8061 - protein, 295 aa, synthetic construct
  REGION 1..295: note = Description of Artificial Sequence: Synthetic polypeptide
ERKSSVECPPCPAPPVAGPSVFLFPPKPKDTLMISRTPEVTCVVVDVSHEDPEVQFNWYVDGVEVHNAKTKPREEQFNSTFRVVSVLTVVHQDWLNGKEYKCKVSNKGLPAPIEKTISKTKGQPREPQVYTLPPSREEMTKNQVSLTCLVKGFYPSDIAVEWESNGQPENNYKTTPPMLDSDGSFFLYSKLTVDKSRWQQGNVFSCSVMHEALHNHYTQKSLSLSPGAPAPAPAPAPAPAPAPAPAPAGGWYPCWIARVGELCDLEEGPVNRGGGGSGGVVCQDWEGVELCWQGG

SEQ ID NO: 8062 - protein, 294 aa, synthetic construct
  REGION 1..294: note = Description of Artificial Sequence: Synthetic polypeptide
ERKSSVECPPCPAPPVAGPSVFLFPPKPKDTLMISRTPEVTCVVVDVSHEDPEVQFNWYVDGVEVHNAKTKPREEQFNSTFRVVSVLTVVHQDWLNGKEYKCKVSNKGLPAPIEKTISKTKGQPREPQVYTLPPSREEMTKNQVSLTCLVKGFYPSDIAVEWESNGQPENNYKTTPPMLDSDGSFFLYSKLTVDKSRWQQGNVFSCSVMHEALHNHYTQKSLSLSPGAPAPAPAPAPAPAPAPAPAPAGGAVEFYPCWLARIGELCDLVEPGGGGSGGVVCQDWEGVELCWQGG

SEQ ID NO: 8063 - protein, 289 aa, synthetic construct
  REGION 1..289: note = Description of Artificial Sequence: Synthetic polypeptide
ERKSSVECPPCPAPPVAGPSVFLFPPKPKDTLMISRTPEVTCVVVDVSHEDPEVQFNWYVDGVEVHNAKTKPREEQFNSTFRVVSVLTVVHQDWLNGKEYKCKVSNKGLPAPIEKTISKTKGQPREPQVYTLPPSREEMTKNQVSLTCLVKGFYPSDIAVEWESNGQPENNYKTTPPMLDSDGSFFLYSKLTVDKSRWQQGNVFSCSVMHEALHNHYTQKSLSLSPGAPAPAPAPAPAPAPAPAPAPAGGWYPCWIARVGELCDMEGGGGSGGVVCQDWEGVELCWQGG

SEQ ID NO: 8064 - protein, 293 aa, synthetic construct
  REGION 1..293: note = Description of Artificial Sequence: Synthetic polypeptide
ERKSSVECPPCPAPPVAGPSVFLFPPKPKDTLMISRTPEVTCVVVDVSHEDPEVQFNWYVDGVEVHNAKTKPREEQFNSTFRVVSVLTVVHQDWLNGKEYKCKVSNKGLPAPIEKTISKTKGQPREPQVYTLPPSREEMTKNQVSLTCLVKGFYPSDIAVEWESNGQPENNYKTTPPMLDSDGSFFLYSKLTVDKSRWQQGNVFSCSVMHEALHNHYTQKSLSLSPGAPAPAPAPAPAPAPAPAPAPAGGEWFHDCFLAKVGDLCDLFLWGGGGSGGVVCQDWEGVELCWQGG

SEQ ID NO: 8065 - protein, 293 aa, synthetic construct
  REGION 1..293: note = Description of Artificial Sequence: Synthetic polypeptide
ERKSSVECPPCPAPPVAGPSVFLFPPKPKDTLMISRTPEVTCVVVDVSHEDPEVQFNWYVDGVEVHNAKTKPREEQFNSTFRVVSVLTVVHQDWLNGKEYKCKVSNKGLPAPIEKTISKTKGQPREPQVYTLPPSREEMTKNQVSLTCLVKGFYPSDIAVEWESNGQPENNYKTTPPMLDSDGSFFLYSKLTVDKSRWQQGNVFSCSVMHEALHNHYTQKSLSLSPGAPAPAPAPAPAPAPAPAPAPAGGRYVHDCFIAQVGDLCDLFLHGGGGSGGVVCQDWEGVELCWQGG

SEQ ID NO: 8066 - protein, 293 aa, synthetic construct
  REGION 1..293: note = Description of Artificial Sequence: Synthetic polypeptide
ERKSSVECPPCPAPPVAGPSVFLFPPKPKDTLMISRTPEVTCVVVDVSHEDPEVQFNWYVDGVEVHNAKTKPREEQFNSTFRVVSVLTVVHQDWLNGKEYKCKVSNKGLPAPIEKTISKTKGQPREPQVYTLPPSREEMTKNQVSLTCLVKGFYPSDIAVEWESNGQPENNYKTTPPMLDSDGSFFLYSKLTVDKSRWQQGNVFSCSVMHEALHNHYTQKSLSLSPGAPAPAPAPAPAPAPAPAPAPAGGRSLVDCFLVKVGDLCDFFNWGGGGSGGVVCQDWEGVELCWQGG

SEQ ID NO: 8067 - protein, 289 aa, synthetic construct
  REGION 1..289: note = Description of Artificial Sequence: Synthetic polypeptide
ERKSSVECPPCPAPPVAGPSVFLFPPKPKDTLMISRTPEVTCVVVDVSHEDPEVQFNWYVDGVEVHNAKTKPREEQFNSTFRVVSVLTVVHQDWLNGKEYKCKVSNKGLPAPIEKTISKTKGQPREPQVYTLPPSREEMTKNQVSLTCLVKGFYPSDIAVEWESNGQPENNYKTTPPMLDSDGSFFLYSKLTVDKSRWQQGNVFSCSVMHEALHNHYTQKSLSLSPGAPAPAPAPAPAPAPAPAPAPAGGWYPCWIARVGELCDLEGGGGSGGVVCQDWEGVELCWQGG

SEQ ID NO: 8068 - protein, 289 aa, synthetic construct
  REGION 1..289: note = Description of Artificial Sequence: Synthetic polypeptide
ERKSSVECPPCPAPPVAGPSVFLFPPKPKDTLMISRTPEVTCVVVDVSHEDPEVQFNWYVDGVEVHNAKTKPREEQFNSTFRVVSVLTVVHQDWLNGKEYKCKVSNKGLPAPIEKTISKTKGQPREPQVYTLPPSREEMTKNQVSLTCLVKGFYPSDIAVEWESNGQPENNYKTTPPMLDSDGSFFLYSKLTVDKSRWQQGNVFSCSVMHEALHNHYTQKSLSLSPGAPAPAPAPAPAPAPAPAPAPAGGWYPCWLAQVGELCDLDGGGGSGGVVCQDWEGVELCWQGG

SEQ ID NO: 8069 - protein, 300 aa, synthetic construct
  REGION 1..300: note = Description of Artificial Sequence: Synthetic polypeptide
ERKSSVECPPCPAPPVAGPSVFLFPPKPKDTLMISRTPEVTCVVVDVSHEDPEVQFNWYVDGVEVHNAKTKPREEQFNSTFRVVSVLTVVHQDWLNGKEYKCKVSNKGLPAPIEKTISKTKGQPREPQVYTLPPSREEMTKNQVSLTCLVKGFYPSDIAVEWESNGQPENNYKTTPPMLDSDGSFFLYSKLTVDKSRWQQGNVFSCSVMHEALHNHYTQKSLSLSPGAPAPAPAPAPAPAPAPAPAPAGGWYPCWIARVGELCDLEEGPVNRGGGGSGGGGSGGVVCQDWEGVELCWQGG

SEQ ID NO: 8070 - protein, 305 aa, synthetic construct
  REGION 1..305: note = Description of Artificial Sequence: Synthetic polypeptide
ERKSSVECPPCPAPPVAGPSVFLFPPKPKDTLMISRTPEVTCVVVDVSHEDPEVQFNWYVDGVEVHNAKTKPREEQFNSTFRVVSVLTVVHQDWLNGKEYKCKVSNKGLPAPIEKTISKTKGQPREPQVYTLPPSREEMTKNQVSLTCLVKGFYPSDIAVEWESNGQPENNYKTTPPMLDSDGSFFLYSKLTVDKSRWQQGNVFSCSVMHEALHNHYTQKSLSLSPGAPAPAPAPAPAPAPAPAPAPAGGWYPCWIARVGELCDLEEGPVNRGGGGSGGGGSGGGGSGGVVCQDWEGVELCWQGG

SEQ ID NO: 8071 - protein, 310 aa, synthetic construct
  REGION 1..310: note = Description of Artificial Sequence: Synthetic polypeptide
ERKSSVECPPCPAPPVAGPSVFLFPPKPKDTLMISRTPEVTCVVVDVSHEDPEVQFNWYVDGVEVHNAKTKPREEQFNSTFRVVSVLTVVHQDWLNGKEYKCKVSNKGLPAPIEKTISKTKGQPREPQVYTLPPSREEMTKNQVSLTCLVKGFYPSDIAVEWESNGQPENNYKTTPPMLDSDGSFFLYSKLTVDKSRWQQGNVFSCSVMHEALHNHYTQKSLSLSPGAPAPAPAPAPAPAPAPAPAPAGGWYPCWIARVGELCDLEEGPVNRGGGGSGGGGSGGGGSGGGGSGGVVCQDWEGVELCWQGG

SEQ ID NO: 8072 - protein, 298 aa, synthetic construct
  REGION 1..298: note = Description of Artificial Sequence: Synthetic polypeptide
ERKSSVECPPCPAPPVAGPSVFLFPPKPKDTLMISRTPEVTCVVVDVSHEDPEVQFNWYVDGVEVHNAKTKPREEQFNSTFRVVSVLTVVHQDWLNGKEYKCKVSNKGLPAPIEKTISKTKGQPREPQVYTLPPSREEMTKNQVSLTCLVKGFYPSDIAVEWESNGQPENNYKTTPPMLDSDGSFFLYSKLTVDKSRWQQGNVFSCSVMHEALHNHYTQKSLSLSPGAPAPAPAPAPAPAPAPAPAPAGGRYVHDCFIAQVGDLCDLFLHGGGGSGGGGSGGVVCQDWEGVELCWQGG

SEQ ID NO: 8073 - protein, 303 aa, synthetic construct
  REGION 1..303: note = Description of Artificial Sequence: Synthetic polypeptide
ERKSSVECPPCPAPPVAGPSVFLFPPKPKDTLMISRTPEVTCVVVDVSHEDPEVQFNWYVDGVEVHNAKTKPREEQFNSTFRVVSVLTVVHQDWLNGKEYKCKVSNKGLPAPIEKTISKTKGQPREPQVYTLPPSREEMTKNQVSLTCLVKGFYPSDIAVEWESNGQPENNYKTTPPMLDSDGSFFLYSKLTVDKSRWQQGNVFSCSVMHEALHNHYTQKSLSLSPGAPAPAPAPAPAPAPAPAPAPAGGRYVHDCFIAQVGDLCDLFLHGGGGSGGGGSGGGGSGGVVCQDWEGVELCWQGG

SEQ ID NO: 8074 - protein, 308 aa, synthetic construct
  REGION 1..308: note = Description of Artificial Sequence: Synthetic polypeptide
ERKSSVECPPCPAPPVAGPSVFLFPPKPKDTLMISRTPEVTCVVVDVSHEDPEVQFNWYVDGVEVHNAKTKPREEQFNSTFRVVSVLTVVHQDWLNGKEYKCKVSNKGLPAPIEKTISKTKGQPREPQVYTLPPSREEMTKNQVSLTCLVKGFYPSDIAVEWESNGQPENNYKTTPPMLDSDGSFFLYSKLTVDKSRWQQGNVFSCSVMHEALHNHYTQKSLSLSPGAPAPAPAPAPAPAPAPAPAPAGGRYVHDCFIAQVGDLCDLFLHGGGGSGGGGSGGGGSGGGGSGGVVCQDWEGVELCWQGG

SEQ ID NO: 8075 - protein, 288 aa, synthetic construct
  REGION 1..288: note = Description of Artificial Sequence: Synthetic polypeptide
DKTHTCPPCPAPEAAGGPSVFLFPPKPKDTLMISRTPEVTCVVVDVSHEDPEVKFNWYVDGVEVHNAKTKPREEQYNSTYRVVSVLTVLHQDWLNGKEYKCKVSNKALGAPIEKTISKAKGQPREPQVYVYPPSRDELTKNQVSLTCLVKGFYPSDIAVEWESNGQPENNYKTTPPVLDSDGSFALVSKLTVDKSRWQQGNVFSCSVMHEALHNHYTQKSLSLSPGAPAPAPAPAPAPAPAPAPAPAGGLVDCFKVKVGELCDLFGGGGSGGVVCQDWEGVELCWQGG

SEQ ID NO: 8076 - protein, 226 aa, synthetic construct
  REGION 1..226: note = Description of Artificial Sequence: Synthetic polypeptide
DKTHTCPPCPAPEAAGGPSVFLFPPKPKDTLMISRTPEVTCVVVDVSHEDPEVKFNWYVDGVEVHNAKTKPREEQYNSTYRVVSVLTVLHQDWLNGKEYKCKVSNKALGAPIEKTISKAKGQPREPQVYVLPPSRDELTKNQVSLLCLVKGFYPSDIAVEWESNGQPENNYLTWPPVLDSDGSFFLYSKLTVDKSRWQQGNVFSCSVMHEALHNHYTQKSLSLSPG

SEQ ID NO: 8077 - protein, 288 aa, synthetic construct
  REGION 1..288: note = Description of Artificial Sequence: Synthetic polypeptide
DKTHTCPPCPAPEAAGGPSVFLFPPKPKDTLMISRTPEVTCVVVDVSHEDPEVKFNWYVDGVEVHNAKTKPREEQYNSTYRVVSVLTVLHQDWLNGKEYKCKVSNKALGAPIEKTISKAKGQPREPQVYTLPPCRDELTKNQVSLWCLVKGFYPSDIAVEWESNGQPENNYKTTPPVLDSDGSFFLYSKLTVDKSRWQQGNVFSCSVMHEALHNHYTQKSLSLSPGAPAPAPAPAPAPAPAPAPAPAGGLVDCFKVKVGELCDLFGGGGSGGVVCQDWEGVELCWQGG

SEQ ID NO: 8078 - protein, 226 aa, synthetic construct
  REGION 1..226: note = Description of Artificial Sequence: Synthetic polypeptide
DKTHTCPPCPAPEAAGGPSVFLFPPKPKDTLMISRTPEVTCVVVDVSHEDPEVKFNWYVDGVEVHNAKTKPREEQYNSTYRVVSVLTVLHQDWLNGKEYKCKVSNKALGAPIEKTISKAKGQPREPQVCTLPPSRDELTKNQVSLSCAVKGFYPSDIAVEWESNGQPENNYKTTPPVLDSDGSFFLVSKLTVDKSRWQQGNVFSCSVMHEALHNHYTQKSLSLSPG

SEQ ID NO: 8079 - protein, 292 aa, synthetic construct
  REGION 1..292: note = Description of Artificial Sequence: Synthetic polypeptide
DKTHTCPPCPAPEAAGGPSVFLFPPKPKDTLMISRTPEVTCVVVDVSHEDPEVKFNWYVDGVEVHNAKTKPREEQYNSTYRVVSVLTVLHQDWLNGKEYKCKVSNKALGAPIEKTISKAKGQPREPQVYVYPPSRDELTKNQVSLTCLVKGFYPSDIAVEWESNGQPENNYKTTPPVLDSDGSFALVSKLTVDKSRWQQGNVFSCSVMHEALHNHYTQKSLSLSPGAPAPAPAPAPAPAPAPAPAPAGGRYVHDCFIAQVGDLCDLFLHGGGGSGGVVCQDWEGVELCWQGG

SEQ ID NO: 8080 - protein, 292 aa, synthetic construct
  REGION 1..292: note = Description of Artificial Sequence: Synthetic polypeptide
DKTHTCPPCPAPEAAGGPSVFLFPPKPKDTLMISRTPEVTCVVVDVSHEDPEVKFNWYVDGVEVHNAKTKPREEQYNSTYRVVSVLTVLHQDWLNGKEYKCKVSNKALGAPIEKTISKAKGQPREPQVYTLPPCRDELTKNQVSLWCLVKGFYPSDIAVEWESNGQPENNYKTTPPVLDSDGSFFLYSKLTVDKSRWQQGNVFSCSVMHEALHNHYTQKSLSLSPGAPAPAPAPAPAPAPAPAPAPAGGRYVHDCFIAQVGDLCDLFLHGGGGSGGVVCQDWEGVELCWQGG

SEQ ID NO: 8081 - protein, 287 aa, synthetic construct
  REGION 1..287: note = Description of Artificial Sequence: Synthetic polypeptide
DKTHTCPPCPAPEAAGGPSVFLFPPKPKDTLMISRTPEVTCVVVDVSHEDPEVKFNWYVDGVEVHNAKTKPREEQYNSTYRVVSVLTVLHQDWLNGKEYKCKVSNKALGAPIEKTISKAKGQPREPQVYVYPPSRDELTKNQVSLTCLVKGFYPSDIAVEWESNGQPENNYKTTPPVLDSDGSFALVSKLTVDKSRWQQGNVFSCSVMHEALHNHYTQKSLSLSPGGSGSGSGSGSGSGSGSGSGSGGWYSCWMAQLGELCDLDGGGGSGGVVCQDWEGVELCWQGG

SEQ ID NO: 8082 - protein, 287 aa, synthetic construct
  REGION 1..287: note = Description of Artificial Sequence: Synthetic polypeptide
DKTHTCPPCPAPEAAGGPSVFLFPPKPKDTLMISRTPEVTCVVVDVSHEDPEVKFNWYVDGVEVHNAKTKPREEQYNSTYRVVSVLTVLHQDWLNGKEYKCKVSNKALGAPIEKTISKAKGQPREPQVYTLPPCRDELTKNQVSLWCLVKGFYPSDIAVEWESNGQPENNYKTTPPVLDSDGSFFLYSKLTVDKSRWQQGNVFSCSVMHEALHNHYTQKSLSLSPGGSGSGSGSGSGSGSGSGSGSGGWYSCWMAQLGELCDLDGGGGSGGVVCQDWEGVELCWQGG

SEQ ID NO: 8083-9000 - skipped (918 entries)

SEQ ID NO: 9001 - protein, 20 aa, synthetic construct
  REGION 1..20: note = Description of Artificial Sequence: Synthetic peptide
YPCWLARVGELCDLDSGDVH

SEQ ID NO: 9002 - protein, 20 aa, synthetic construct
  REGION 1..20: note = Description of Artificial Sequence: Synthetic peptide
APCWLARVGELCDLDSGDVH

SEQ ID NO: 9003 - protein, 20 aa, synthetic construct
  REGION 1..20: note = Description of Artificial Sequence: Synthetic peptide
APCALARVGELCDLDSGDVH

SEQ ID NO: 9004 - protein, 20 aa, synthetic construct
  REGION 1..20: note = Description of Artificial Sequence: Synthetic peptide
APCALAAVGELCDLDSGDVH

SEQ ID NO: 9005 - protein, 20 aa, synthetic construct
  REGION 1..20: note = Description of Artificial Sequence: Synthetic peptide
APCALAAVGALCDLDSGDVH

SEQ ID NO: 9006 - protein, 20 aa, synthetic construct
  REGION 1..20: note = Description of Artificial Sequence: Synthetic peptide
APCALAAVGALCDLASGDVH

SEQ ID NO: 9007 - protein, 20 aa, synthetic construct
  REGION 1..20: note = Description of Artificial Sequence: Synthetic peptide
APCALAAVGALCDLAAGDVH

SEQ ID NO: 9008-9010 - skipped (3 entries)

SEQ ID NO: 9011 - protein, 14 aa, synthetic construct
  REGION 1..14: note = Description of Artificial Sequence: Synthetic peptide
YWCWMAQVGELCDL

SEQ ID NO: 9012 - protein, 14 aa, synthetic construct
  REGION 1..14: note = Description of Artificial Sequence: Synthetic peptide
YHCWMAQVGELCDL

SEQ ID NO: 9013 - protein, 14 aa, synthetic construct
  REGION 1..14: note = Description of Artificial Sequence: Synthetic peptide
YHCWMGQVGELCDL

SEQ ID NO: 9014 - protein, 14 aa, synthetic construct
  REGION 1..14: note = Description of Artificial Sequence: Synthetic peptide
YHCWMGQMGELCDL

SEQ ID NO: 9015 - protein, 14 aa, synthetic construct
  REGION 1..14: note = Description of Artificial Sequence: Synthetic peptide
YHCWMGQMGELCEL

SEQ ID NO: 9016 - protein, 14 aa, synthetic construct
  REGION 1..14: note = Description of Artificial Sequence: Synthetic peptide
YHCWMGQMGELCEM

SEQ ID NO: 9017-9020 - skipped (4 entries)

SEQ ID NO: 9021 - protein, 20 aa, synthetic construct
  REGION 1..20: note = Description of Artificial Sequence: Synthetic peptide
MGFYPCWTAQLGELCDLSVD

SEQ ID NO: 9022 - protein, 19 aa, synthetic construct
  REGION 1..19: note = Description of Artificial Sequence: Synthetic peptide
GFYPCWTAQLGELCDLSVD

SEQ ID NO: 9023 - protein, 18 aa, synthetic construct
  REGION 1..18: note = Description of Artificial Sequence: Synthetic peptide
FYPCWTAQLGELCDLSVD

SEQ ID NO: 9024 - protein, 17 aa, synthetic construct
  REGION 1..17: note = Description of Artificial Sequence: Synthetic peptide
YPCWTAQLGELCDLSVD

SEQ ID NO: 9025 - protein, 19 aa, synthetic construct
  REGION 1..19: note = Description of Artificial Sequence: Synthetic peptide
MGFYPCWTAQLGELCDLSV

SEQ ID NO: 9026 - protein, 18 aa, synthetic construct
  REGION 1..18: note = Description of Artificial Sequence: Synthetic peptide
MGFYPCWTAQLGELCDLS

SEQ ID NO: 9027 - protein, 17 aa, synthetic construct
  REGION 1..17: note = Description of Artificial Sequence: Synthetic peptide
MGFYPCWTAQLGELCDL

SEQ ID NO: 9028 - protein, 18 aa, synthetic construct
  REGION 1..18: note = Description of Artificial Sequence: Synthetic peptide
GFYPCWTAQLGELCDLSV

SEQ ID NO: 9029 - protein, 15 aa, synthetic construct
  REGION 1..15: note = Description of Artificial Sequence: Synthetic peptide
FYPCWTAQLGELCDL

SEQ ID NO: 9030 - skipped

SEQ ID NO: 9031 - protein, 14 aa, synthetic construct
  REGION 1..14: note = Description of Artificial Sequence: Synthetic peptide
KYCGFAQLGELCVL

SEQ ID NO: 9032 - protein, 15 aa, synthetic construct
  REGION 1..15: note = Description of Artificial Sequence: Synthetic peptide
GKYCGFAQLGELCVL

SEQ ID NO: 9033 - protein, 16 aa, synthetic construct
  REGION 1..16: note = Description of Artificial Sequence: Synthetic peptide
GGKYCGFAQLGELCVL

SEQ ID NO: 9034 - protein, 17 aa, synthetic construct
  REGION 1..17: note = Description of Artificial Sequence: Synthetic peptide
GGGKYCGFAQLGELCVL

SEQ ID NO: 9035 - protein, 15 aa, synthetic construct
  REGION 1..15: note = Description of Artificial Sequence: Synthetic peptide
KYCGFAQLGELCVLG

SEQ ID NO: 9036 - protein, 16 aa, synthetic construct
  REGION 1..16: note = Description of Artificial Sequence: Synthetic peptide
KYCGFAQLGELCVLGG

SEQ ID NO: 9037 - protein, 17 aa, synthetic construct
  REGION 1..17: note = Description of Artificial Sequence: Synthetic peptide
KYCGFAQLGELCVLGGG

SEQ ID NO: 9038 - protein, 16 aa, synthetic construct
  REGION 1..16: note = Description of Artificial Sequence: Synthetic peptide
GKYCGFAQLGELCVLG

SEQ ID NO: 9039 - protein, 17 aa, synthetic construct
  REGION 1..17: note = Description of Artificial Sequence: Synthetic peptide
GGKYCGFAQLGELCVLG

SEQ ID NO: 9040-9300 - skipped (261 entries)

SEQ ID NO: 9301 - protein, 20 aa, synthetic construct
  REGION 1..20: note = Description of Artificial Sequence: Synthetic peptide
GGWYPCWMAQLGELCDLDGG

SEQ ID NO: 9302 - protein, 19 aa, synthetic construct
  REGION 1..19: note = Description of Artificial Sequence: Synthetic peptide
GWYPCWMAQLGELCDLDGG

SEQ ID NO: 9303 - protein, 18 aa, synthetic construct
  REGION 1..18: note = Description of Artificial Sequence: Synthetic peptide
WYPCWMAQLGELCDLDGG

SEQ ID NO: 9304 - protein, 17 aa, synthetic construct
  REGION 1..17: note = Description of Artificial Sequence: Synthetic peptide
YPCWMAQLGELCDLDGG

SEQ ID NO: 9305 - protein, 16 aa, synthetic construct
  REGION 1..16: note = Description of Artificial Sequence: Synthetic peptide
PCWMAQLGELCDLDGG

SEQ ID NO: 9306 - protein, 15 aa, synthetic construct
  REGION 1..15: note = Description of Artificial Sequence: Synthetic peptide
CWMAQLGELCDLDGG

SEQ ID NO: 9307 - protein, 19 aa, synthetic construct
  REGION 1..19: note = Description of Artificial Sequence: Synthetic peptide
GGWYPCWMAQLGELCDLDG

SEQ ID NO: 9308 - protein, 18 aa, synthetic construct
  REGION 1..18: note = Description of Artificial Sequence: Synthetic peptide
GGWYPCWMAQLGELCDLD

SEQ ID NO: 9309 - protein, 17 aa, synthetic construct
  REGION 1..17: note = Description of Artificial Sequence: Synthetic peptide
GGWYPCWMAQLGELCDL

SEQ ID NO: 9310 - protein, 16 aa, synthetic construct
  REGION 1..16: note = Description of Artificial Sequence: Synthetic peptide
GGWYPCWMAQLGELCD

SEQ ID NO: 9311 - protein, 15 aa, synthetic construct
  REGION 1..15: note = Description of Artificial Sequence: Synthetic peptide
GGWYPCWMAQLGELC

SEQ ID NO: 9312 - protein, 18 aa, synthetic construct
  REGION 1..18: note = Description of Artificial Sequence: Synthetic peptide
GWYPCWMAQLGELCDLDG

SEQ ID NO: 9313 - protein, 17 aa, synthetic construct
  REGION 1..17: note = Description of Artificial Sequence: Synthetic peptide
WYPCWMAQLGELCDLDG

SEQ ID NO: 9314 - protein, 9 aa, synthetic construct
  REGION 1..9: note = Description of Artificial Sequence: Synthetic peptide
PCWMAQLGE

SEQ ID NO: 9315-9339 - skipped (25 entries)

SEQ ID NO: 9340 - protein, 18 aa, synthetic construct
  REGION 1..18: note = Description of Artificial Sequence: Synthetic peptide
GGVVCQDWEGVELCWQGG

SEQ ID NO: 9341 - protein, 17 aa, synthetic construct
  REGION 1..17: note = Description of Artificial Sequence: Synthetic peptide
GVVCQDWEGVELCWQGG

SEQ ID NO: 9342 - protein, 16 aa, synthetic construct
  REGION 1..16: note = Description of Artificial Sequence: Synthetic peptide
VVCQDWEGVELCWQGG

SEQ ID NO: 9343 - protein, 15 aa, synthetic construct
  REGION 1..15: note = Description of Artificial Sequence: Synthetic peptide
VCQDWEGVELCWQGG

SEQ ID NO: 9344 - protein, 14 aa, synthetic construct
  REGION 1..14: note = Description of Artificial Sequence: Synthetic peptide
CQDWEGVELCWQGG

SEQ ID NO: 9345 - protein, 17 aa, synthetic construct
  REGION 1..17: note = Description of Artificial Sequence: Synthetic peptide
GGVVCQDWEGVELCWQG

SEQ ID NO: 9346 - protein, 16 aa, synthetic construct
  REGION 1..16: note = Description of Artificial Sequence: Synthetic peptide
GGVVCQDWEGVELCWQ

SEQ ID NO: 9347 - protein, 15 aa, synthetic construct
  REGION 1..15: note = Description of Artificial Sequence: Synthetic peptide
GGVVCQDWEGVELCW

SEQ ID NO: 9348 - protein, 14 aa, synthetic construct
  REGION 1..14: note = Description of Artificial Sequence: Synthetic peptide
GGVVCQDWEGVELC

SEQ ID NO: 9349 - protein, 16 aa, synthetic construct
  REGION 1..16: note = Description of Artificial Sequence: Synthetic peptide
GVVCQDWEGVELCWQG

SEQ ID NO: 9350 - protein, 13 aa, synthetic construct
  REGION 1..13: note = Description of Artificial Sequence: Synthetic peptide
VCQDWEGVELCWQ

SEQ ID NO: 9351 - protein, 12 aa, synthetic construct
  REGION 1..12: note = Description of Artificial Sequence: Synthetic peptide
VCQDWEGVELCW

SEQ ID NO: 9352 - protein, 11 aa, synthetic construct
  REGION 1..11: note = Description of Artificial Sequence: Synthetic peptide
CQDWEGVELCW

SEQ ID NO: 9353 - protein, 10 aa, synthetic construct
  REGION 1..10: note = Description of Artificial Sequence: Synthetic peptide
CQDWEGVELC

SEQ ID NO: 9354-9379 - skipped (26 entries)

SEQ ID NO: 9380 - protein, 20 aa, synthetic construct
  REGION 1..20: note = Description of Artificial Sequence: Synthetic peptide
  REGION 1..20: note = MISC_FEATURE - This sequence may encompass 1-20 residues
GGGGGGGGGGGGGGGGGGGG

SEQ ID NO: 9381 - protein, 40 aa, synthetic construct
  REGION 1..40: note = Description of Artificial Sequence: Synthetic polypeptide
  REGION 1..40: note = MISC_FEATURE - This sequence may encompass 1-20 "Gly Ser" repeating units
GSGSGSGSGSGSGSGSGSGSGSGSGSGSGSGSGSGSGSGS

SEQ ID NO: 9382 - protein, 60 aa, synthetic construct
  REGION 1..60: note = Description of Artificial Sequence: Synthetic polypeptide
  REGION 1..60: note = MISC_FEATURE - This sequence may encompass 1-20 "Gly Gly Ser" repeating units
GGSGGSGGSGGSGGSGGSGGSGGSGGSGGSGGSGGSGGSGGSGGSGGSGGSGGSGGSGGS

SEQ ID NO: 9383 - protein, 80 aa, synthetic construct
  REGION 1..80: note = Description of Artificial Sequence: Synthetic polypeptide
  REGION 1..80: note = MISC_FEATURE - This sequence may encompass 1-20 "Gly Gly Gly Ser" repeating units
GGGSGGGSGGGSGGGSGGGSGGGSGGGSGGGSGGGSGGGSGGGSGGGSGGGSGGGSGGGSGGGSGGGSGGGSGGGSGGGS

SEQ ID NO: 9384 - protein, 100 aa, synthetic construct
  REGION 1..100: note = Description of Artificial Sequence: Synthetic polypeptide
  REGION 1..100: note = MISC_FEATURE - This sequence may encompass 1-20 "Gly Gly Gly Gly Ser" repeating units
GGGGSGGGGSGGGGSGGGGSGGGGSGGGGSGGGGSGGGGSGGGGSGGGGSGGGGSGGGGSGGGGSGGGGSGGGGSGGGGSGGGGSGGGGSGGGGSGGGGS

SEQ ID NO: 9385 - protein, 10 aa, synthetic construct
  REGION 1..10: note = Description of Artificial Sequence: Synthetic peptide
  REGION 1..10: note = MISC_FEATURE - This sequence may encompass 1-10 residues
GGGGGGGGGG

SEQ ID NO: 9386 - protein, 20 aa, synthetic construct
  REGION 1..20: note = Description of Artificial Sequence: Synthetic peptide
  REGION 1..20: note = MISC_FEATURE - This sequence may encompass 1-10 "Gly Ser" repeating units
GSGSGSGSGSGSGSGSGSGS

SEQ ID NO: 9387 - protein, 30 aa, synthetic construct
  REGION 1..30: note = Description of Artificial Sequence: Synthetic polypeptide
  REGION 1..30: note = MISC_FEATURE - This sequence may encompass 1-10 "Gly Gly Ser" repeating units
GGSGGSGGSGGSGGSGGSGGSGGSGGSGGS

SEQ ID NO: 9388 - protein, 40 aa, synthetic construct
  REGION 1..40: note = Description of Artificial Sequence: Synthetic polypeptide
  REGION 1..40: note = MISC_FEATURE - This sequence may encompass 1-10 "Gly Gly Gly Ser" repeating units
GGGSGGGSGGGSGGGSGGGSGGGSGGGSGGGSGGGSGGGS

SEQ ID NO: 9389 - protein, 50 aa, synthetic construct
  REGION 1..50: note = Description of Artificial Sequence: Synthetic polypeptide
  REGION 1..50: note = MISC_FEATURE - This sequence may encompass 1-10 "Gly Gly Gly Gly Ser" repeating units
GGGGSGGGGSGGGGSGGGGSGGGGSGGGGSGGGGSGGGGSGGGGSGGGGS

SEQ ID NO: 9390 - protein, 5 aa, synthetic construct
  REGION 1..5: note = Description of Artificial Sequence: Synthetic peptide
  REGION 1..5: note = MISC_FEATURE - This sequence may encompass 1-5 residues
GGGGG

SEQ ID NO: 9391 - protein, 10 aa, synthetic construct
  REGION 1..10: note = Description of Artificial Sequence: Synthetic peptide
  REGION 1..10: note = MISC_FEATURE - This sequence may encompass 1-5 "Gly Ser" repeating units
GSGSGSGSGS

SEQ ID NO: 9392 - protein, 15 aa, synthetic construct
  REGION 1..15: note = Description of Artificial Sequence: Synthetic peptide
  REGION 1..15: note = MISC_FEATURE - This sequence may encompass 1-5 "Gly Gly Ser" repeating units
GGSGGSGGSGGSGGS

SEQ ID NO: 9393 - protein, 20 aa, synthetic construct
  REGION 1..20: note = Description of Artificial Sequence: Synthetic peptide
  REGION 1..20: note = MISC_FEATURE - This sequence may encompass 1-5 "Gly Gly Gly Ser" repeating units
GGGSGGGSGGGSGGGSGGGS

SEQ ID NO: 9394 - protein, 25 aa, synthetic construct
  REGION 1..25: note = Description of Artificial Sequence: Synthetic peptide
  REGION 1..25: note = MISC_FEATURE - This sequence may encompass 1-5 "Gly Gly Gly Gly Ser" repeating units
GGGGSGGGGSGGGGSGGGGSGGGGS

SEQ ID NO: 9395 - protein, 5 aa, synthetic construct
  REGION 1..5: note = Description of Artificial Sequence: Synthetic peptide
GGGGS

SEQ ID NO: 9396 - protein, 10 aa, synthetic construct
  REGION 1..10: note = Description of Artificial Sequence: Synthetic peptide
GGGGSGGGGS

SEQ ID NO: 9397 - protein, 15 aa, synthetic construct
  REGION 1..15: note = Description of Artificial Sequence: Synthetic peptide
GGGGSGGGGSGGGGS

SEQ ID NO: 9398 - protein, 20 aa, synthetic construct
  REGION 1..20: note = Description of Artificial Sequence: Synthetic peptide
GGGGSGGGGSGGGGSGGGGS

SEQ ID NO: 9399-9400 - skipped (2 entries)

SEQ ID NO: 9401 - protein, 5 aa, synthetic construct
  REGION 1..5: note = Description of Artificial Sequence: Synthetic peptide
GGGGG

SEQ ID NO: 9402 - skipped

SEQ ID NO: 9403 - protein, 4 aa, synthetic construct
  REGION 1..4: note = Description of Artificial Sequence: Synthetic peptide
GGGS

SEQ ID NO: 9404 - protein, 7 aa, synthetic construct
  REGION 1..7: note = Description of Artificial Sequence: Synthetic peptide
GGGGSGG

SEQ ID NO: 9405 - protein, 6 aa, synthetic construct
  REGION 1..6: note = Description of Artificial Sequence: Synthetic peptide
GGSGGS

SEQ ID NO: 9406 - protein, 5 aa, synthetic construct
  REGION 1..5: note = Description of Artificial Sequence: Synthetic peptide
GGGGG

SEQ ID NO: 9407 - protein, 20 aa, synthetic construct
  REGION 1..20: note = Description of Artificial Sequence: Synthetic peptide
GSGSGSGSGSGSGSGSGSGS

SEQ ID NO: 9408-9419 - skipped (12 entries)

SEQ ID NO: 9420 - protein, 20 aa, synthetic construct
  REGION 1..20: note = Description of Artificial Sequence: Synthetic peptide
  REGION 1..20: note = MISC_FEATURE - This sequence may encompass 1-20 residues
PPPPPPPPPPPPPPPPPPPP

SEQ ID NO: 9421 - protein, 40 aa, synthetic construct
  REGION 1..40: note = Description of Artificial Sequence: Synthetic polypeptide
  REGION 1..40: note = MISC_FEATURE - This sequence may encompass 1-20 "Pro Ala" repeating units
PAPAPAPAPAPAPAPAPAPAPAPAPAPAPAPAPAPAPAPA

SEQ ID NO: 9422 - protein, 10 aa, synthetic construct
  REGION 1..10: note = Description of Artificial Sequence: Synthetic peptide
  REGION 1..10: note = MISC_FEATURE - This sequence may encompass 1-10 residues
PPPPPPPPPP

SEQ ID NO: 9423 - protein, 20 aa, synthetic construct
  REGION 1..20: note = Description of Artificial Sequence: Synthetic peptide
  REGION 1..20: note = MISC_FEATURE - This sequence may encompass 1-10 "Pro Ala" repeating units
PAPAPAPAPAPAPAPAPAPA

SEQ ID NO: 9424 - protein, 5 aa, synthetic construct
  REGION 1..5: note = Description of Artificial Sequence: Synthetic peptide
  REGION 1..5: note = MISC_FEATURE - This sequence may encompass 1-5 residues
PPPPP

SEQ ID NO: 9425 - protein, 10 aa, synthetic construct
  REGION 1..10: note = Description of Artificial Sequence: Synthetic peptide
  REGION 1..10: note = MISC_FEATURE - This sequence may encompass 1-5 "Pro Ala" repeating units
PAPAPAPAPA

SEQ ID NO: 9426 - protein, 10 aa, synthetic construct
  REGION 1..10: note = Description of Artificial Sequence: Synthetic peptide
PAPAPAPAPA

SEQ ID NO: 9427 - protein, 14 aa, synthetic construct
  REGION 1..14: note = Description of Artificial Sequence: Synthetic peptide
PAPAPAPAPAPAPA

SEQ ID NO: 9428 - protein, 20 aa, synthetic construct
  REGION 1..20: note = Description of Artificial Sequence: Synthetic peptide
PAPAPAPAPAPAPAPAPAPA

SEQ ID NO: 9429 - protein, 4 aa, synthetic construct
  REGION 1..4: note = Description of Artificial Sequence: Synthetic peptide
  REGION 1..4: note = MISC_FEATURE - This sequence may encompass 1-4 residues
GGGG

SEQ ID NO: 9430 - protein, 5 aa, synthetic construct
  REGION 1..5: note = Description of Artificial Sequence: Synthetic peptide
  REGION 1..5: note = MISC_FEATURE - This sequence may encompass 1-5 residues
GGGGG

SEQ ID NO: 9431 - protein, 6 aa, synthetic construct
  REGION 1..6: note = Description of Artificial Sequence: Synthetic 6xHis tag
HHHHHH

SEQ ID NO: 9432 - protein, 12 aa, synthetic construct
  REGION 1..12: note = Description of Artificial Sequence: Synthetic peptide
APAPAPAPAPAP

1. An IL-2Rβγc binding compound, wherein the IL-2Rβγc binding compound comprises an IL-2Rβγc ligand, wherein the IL-2Rβγc ligand comprises:
a ligand linker;
an IL-2Rγc ligand bound to the ligand linker, wherein the IL-2Rγc ligand comprises any one of SEQ ID NO: 944-1028, 1032, 1034, 1042, 1044, 1051-1060, and 1601-1613; and
an IL-2Rβ ligand bound to the ligand linker, wherein the IL-2Rβ ligand comprises any one of Formula (1) (SEQ ID NO: 805), Formula (1a) (SEQ ID NO: 806), Formula (1b) (SEQ ID NO: 807), Formula (1c) (SEQ ID NO: 808), and Formula (1d) (SEQ ID NO: 809):
-X²¹¹-X²¹²-X²¹³-X²¹⁴-C-X²¹⁵-X²¹⁶-X²¹⁷-X²¹⁸-X²¹⁹-X²²⁰-X²²¹-X²²²-C-X²²³-X²²⁴-X²²⁵ (1)
-X²¹²-X²¹³-X²¹⁴-C-X²¹⁵-X²¹⁶-X²¹⁷-X²¹⁸-X²¹⁹-X²²⁰-X²²¹-X²²²-C-X²²³-X²²⁴- (1a)
-X²¹³-X²¹⁴-C-X²¹⁵-X²¹⁶-X²¹⁷-X²¹⁸-X²¹⁹-X²²⁰-X²²¹-X²²²-C-X²²³-X²²⁴- (1b)
-X²⁴-C-X²¹⁵-X²¹⁶-X¹²⁷-X²¹⁸-X²¹⁹-X²²⁰-X²²¹-X²²²-C-X²²³- (1c)
-C-X²¹⁵-X²¹⁶-X²¹⁷-X²¹⁸-X²¹⁹-X²²⁰-X²²¹-X²²²-C- (1d)
wherein,
X²¹¹ is selected from an amino acid;
X²¹² is selected from F, H, W, and Y;
X²¹³ is selected from F, H, I, L, M, V, W, and Y;
X²¹⁴ is P;
X²¹⁵ is selected from F, H, W, and Y;
X²¹⁶ is selected from F, I, L, M, V, W, and Y;
X²¹⁷ is A;
X²¹⁸ is selected from H, K, N, Q, R, S, T, and Y;
X²¹⁹ is selected from F, I, L, M, V, W, and Y;
X²²⁰ is G;
X²²¹ is selected from D, E, H, N, Q, S, T, and Y;
X²²² is L;
X²²³ is D;
X²²⁴ is selected from F, I, L, M, V, W, and Y; and
X²²⁵ is selected from D and E.

2. The IL-2Rβγc binding compound of claim 1, wherein the Rγc ligand comprises SEQ ID NO: 965.

3. The IL-2Rβγc binding compound of claim 1, wherein X²¹¹ is selected from H, K, and R.

4. The IL-2Rβγc binding compound of claim 1, wherein X²¹² is W.

5. The IL-2Rβγc binding compound of claim 1, wherein X²¹³ is selected from L and Y.

6. The IL-2Rβγc binding compound of claim 1, wherein X²¹⁵ is W.

7. The IL-2Rβγc binding compound of claim 1, wherein X²¹⁶ is M.

8. The IL-2Rβγc binding compound of claim 1, wherein X²¹⁸ is selected from K, Q, and R.

9. The IL-2Rβγc binding compound of claim 1, wherein X²¹⁹ is L.

10. The IL-2Rβγc binding compound of claim 1, wherein X²²¹ is E.

11. The IL-2Rβγc binding compound of claim 1, wherein X²²⁴ is L.

12. The IL-2Rβγc binding compound of claim 1, wherein,
X²¹¹ is selected from H, K, and R;
X²¹² is W;
X²¹³ is Y;
X²¹⁴ is P;
X²¹⁵ is W;
X²¹⁶ is M;
X²¹⁷ is A;
X²¹⁸ is selected N and Q;
X²¹⁹ is selected from L and V;
X²²⁰ is G;
X²²¹ is selected from E, D, and Q;
X²²² is L;
X²²³ is D;
X²²⁴ is selected from L and M; and
X²²⁵ is selected from D and E.

13. The IL-2Rβγc binding compound of claim 1, wherein,
X²¹¹ is selected from H and R;
X²¹² is selected from F and W;
X²¹³ is selected from F, L, W, and Y;
X²¹⁴ is P;
X²¹⁵ is selected from W and Y;
X²¹⁶ is selected from F, I, L, M, and V;
X²¹⁷ is A;
X²¹⁸ is selected H, K, N, Q, and R;
X²¹⁹ is selected from L and V;
X²²⁰ is G;
X²²¹ is selected from D, E, and Q;
X²²² is L;
X²²³ is D;
X²²⁴ is selected L, M, and V; and
X²²⁵ is selected from D and E.

14. The IL-2Rβγc binding compound of claim 1, wherein,
X²¹¹ is selected from H and R;
X²² is W;
X²¹³ is selected from P and Y;
X²¹⁴ is P;
X²¹⁵ is W;
X²¹⁶ is M;
X²¹⁷ is A;
X²¹⁸ is selected from K, Q and R;
X²¹⁹ is L;
X²²⁰ is G;
X²²¹ is Q;
X²²² is L;
X²²³ is D;
X²²⁴ is L; and
X²²⁵ is selected from D and E.

15. The IL-2Rβγc binding compound of claim 1, wherein, the IL-2Rβ ligand comprises any one of SEQ ID NO: 810-903.

16. The IL-2Rβγc binding compound of claim 1, wherein the ligand linker comprises (G)ₙ (SEQ ID NO: 9380), (GS)ₙ(SEQ ID NO: 9381), (GGS)ₙ (SEQ ID NO: 9382), (GGGS)ₙ (SEQ ID NO: 9383), (GGGGS)ₙ (SEQ ID NO: 9384), or a combination of any of the foregoing, wherein n is an integer from 1 to 20.

17. The IL-2Rβγc binding compound of claim 1, wherein the ligand linker comprises (GGGGS) (SEQ ID NO: 9395), (GGGGS)2 (SEQ ID NO: 9396), (GGGGS)3 (SEQ ID NO: 9397), (GGGGS)4 (SEQ ID NO: 9398), (GG) (SEQ ID NO: 9399), (GGG) (SEQ ID NO: 9400), (GGGGG) (SEQ ID NO: 9401), (GGS) (SEQ ID NO: 9402), (GGGS) (SEQ ID NO: 9403), (GGGGSGG) (SEQ ID NO: 9404), (GGS)2 (SEQ ID NO: 9405), (G)5 (SEQ ID NO: 9406), or (GS)10 (SEQ ID NO: 9407).

18. The IL-2Rβγc binding compound of claim 1, wherein the ligand linker comprises (PA)n, wherein n is an integer from 1 to 20.

19. The IL-2Rβγc binding compound of claim 1, wherein the IL-2Rβγc binding compound comprises a construct partner, wherein the IL-2Rβγc ligand is bound to the construct partner.

20. The IL-2Rβγc binding compound of claim 19, wherein in the IL-2Rβγc ligand is bound to the construct partner through a construct linker.

21. The IL-2Rβγc binding compound of claim 20, wherein the construct linker comprises a peptidyl construct linker.

22. The IL-2Rβγc binding compound of claim 21, wherein the peptidyl construct linker is selected from any one of SEQ ID NO: 9380-9401 and 9420-9425, wherein n is an integer from 1 to 30.

23. The IL-2Rβγc binding compound of claim 22, wherein the construct partner is selected from a polymer, a polypeptide, an Fc-fragment, an immunoglobulin fragment, an antibody, a viral surface antigen or a virus-like particle, a cytokine, and a recombinant fusion protein.

24. The IL-2Rβγc binding compound of claim 23, wherein the construct partner is selected from a polyethylene glycol, a hIgG-Fc recombinant fusion protein, and a hIgG1-Fc recombinant fusion protein.

25. The IL-2Rβγc binding compound of claim 19, wherein the construct partner comprises an antibody and the antibody is directed to a tumor antigen.

26. The IL-2Rβγc binding compound of claim 19, wherein the construct partner comprises a cell-targeting moiety.

27. The IL-2Rβγc binding compound of claim 26, wherein cell-targeting moiety comprises a tumor-targeting moiety, an immune cell-targeting moiety, or a combination thereof.

28. A pharmaceutical composition comprising the IL-2Rβγc binding compound of claim 1.
